(19) United States
(12) Patent Application Publication
(10) Pub. No.: US 2026/0014092 A1
(43) Pub. Date: Jan. 15, 2026

(54) EXTRACELLULAR VESICLES FROM MICROALGAE, THEIR USE FOR VACCINES AND FOR IMMUNOMODULATION

(71) Applicant: AGS THERAPEUTICS SAS, Paris (FR)

(72) Inventors: Lila DRITTANTI, Paris (FR); Manuel VEGA, Paris (FR); Rana LEBDY, Antony (FR)

(21) Appl. No.: 19/334,304

(22) Filed: Sep. 19, 2025

Related U.S. Application Data
(63) Continuation of application No. PCT/EP2024/057645, filed on Mar. 21, 2024.
(60) Provisional application No. 63/491,920, filed on Mar. 23, 2023.
(60) Provisional application No. 63/517,083, filed on Aug. 1, 2023.

(51) Int. Cl. A61K 9/51; A61K 31/713; A61K 39/00; A61P 37/04

(52) U.S. Cl. CPC A61K 9/5176; A61K 31/713; A61P 37/04; A61K 2039/55555

(57) ABSTRACT

Provided are vaccines and immunomodulatory compositions containing extracellular vesicles from microalgae (MEVs) that are loaded with bioactive cargo, that includes antigens and/or immunomodulatory proteins, nucleic acids, and nucleic acid encoding the proteins. The MEVs are formulated and administered by a variety of routes of administration that are advantageous for modulating the immune systems. Vaccines include those that are therapeutic for treating a disease, disorder, or condition, those that elicit an immunoprotective response, and/or otherwise modulate the immune system. The compositions include MEVs containing cargos for modulating intracellular receptors.

### RELATED APPLICATIONS

[0001] This application is a continuation of International PCT application No. PCT/EP2024/057645, filed Mar. 21, 2024, published as International Publication No. WO 2024/194423 on Sep. 26, 2024, entitled “Extracellular Vesicles from Microalgae, Their Use for Vaccines and for Immunomodulation,” to inventors Lila Drittanti, Manuel Vega, and Rana Lebdy, and to Applicant AGS Therapeutics SAS, which claims benefit of priority to U.S. provisional application Ser. No. 63/517,083, filed Aug. 1, 2023, entitled “Extracellular Vesicles From Microalgae, Their Biodistribution Upon Intranasal Administration, and Uses Thereof,” to inventors Lila Drittanti and Manuel Vega, and to Applicant AGS Therapeutics SAS; and to U.S. provisional application Ser. No. 63/491,920, filed Mar. 23, 2023, entitled “Extracellular Vesicles from Microalgae, Their Use for Vaccines and for Immunomodulation,” to inventors Lila Drittanti, Rana Lebdy, and Manuel Vega, and to Applicant AGS Therapeutics SAS.

[0002] Benefit of priority is claimed to U.S. provisional application Ser. No. 63/491,920, filed Mar. 23, 2023, entitled “Extracellular Vesicles From Microalgae, Their Use for Vaccines and for Immunomodulation,” to inventors Lila Drittanti, Rana Lebdy, and Manuel Vega, and to Applicant AGS Therapeutics SAS.

[0003] Benefit of priority is claimed to U.S. provisional application Ser. No. 63/517,083, filed Aug. 1, 2023, entitled “Extracellular Vesicles from Microalgae, Their Biodistribution Upon Intranasal Administration, and Uses Thereof,” to inventors Lila Drittanti and Manuel Vega, and to Applicant AGS Therapeutics SAS.

[0004] This application is related to International PCT application No. PCT/EP2023/051650, filed Jan. 24, 2023, published as International PCT publication No. WO 2023/144127, on Aug. 3, 2023, entitled “Extracellular Vesicles from Microalgae, Their Biodistribution Upon Administration, and Uses,” to inventors Lila Drittanti and Manuel Vega, and to Applicant AGS Therapeutics SAS.

[0005] This application is related to International PCT application No. PCT/EP2022/070371, filed Jul. 20, 2022, published as International PCT publication No. WO2023/001894, on Jan. 26, 2023, entitled “Extracellular Vesicles from Microalgae, Their Preparation, and Uses,” to inventors Lila Drittanti, Juan Pablo Vega, Jeremy Pruvost, and Manuel Vega, and to Applicants: AGS Therapeutics SAS, 10 rue Greneta, 75003 Paris, France; AGS-M SAS, 41-43 Quai de Malakoff, 44000 Nantes, France; and Nantes Universite, 1 Quai de Tourville, 44035 Nantes, France.

[0006] Where permitted, the subject matter of each of these applications is incorporated by reference in its entirety.

### INCORPORATION BY REFERENCE OF SEQUENCE LISTING PROVIDED ELECTRONICALLY

[0007] An electronic version of the Sequence Listing is filed herewith, the contents of which are incorporated by reference in their entirety. The electronic file was created on Sep. 17, 2025, is 1,231,339 bytes in size, and is titled 5508SEQ001.xml.

### FIELD

[0008] Provided are compositions containing extracellular vesicles from microalgae (MEVs) that are loaded with bioactive cargo (payloads) and for use as vaccines to induce an immune response for prevention or treatment of a disease or disorder, and for delivery of immune modulators to modulate immune responses.

### BACKGROUND

[0009] Extracellular vesicles (EVs) are natural particles produced by most cells. EVs include exosomes (generally about 30-150 nm in size), which are released to the extracellular environment upon fusion of multivesicular endosomes with the plasma membrane, and include microvesicles (about 50-1000 nm), which are produced by the outward budding of membrane vesicles from the cell surface. Exosomes and microvesicles have similar properties, and in general are referred to as EVs.

[0010] EVs facilitate intercellular communication via cell-cell transfer of proteins and nucleic acids, such as microRNAs (miRNAs), long noncoding RNAs (lncRNAs), and mRNAs. By virtue of this, EVs derived from mammals and plants have been used as carriers for short interfering RNA (siRNA) delivery, microRNA (miRNA), and small molecule drugs. They are a promising delivery vehicle. There is a need for conveniently produced EVs that are readily delivered to cells and tissues. It is an object herein to provide such EVs.

### SUMMARY

[0011] Provided are cargo-loaded extracellular vesicles (EVs) for use for administration to subjects in vivo and cells and cell lines in vitro. EVs are loaded with cargo that includes bioactive molecules, including biomolecules and small molecules, such as diagnostic and/or therapeutic molecules. The EVs herein are from microalgae. Microalgae are unicellular green algae. The EVs herein are from microalgae and are referred to as MEVs. Microalgae are unicellular green algae, and include those that belong to the order Chlorellales, in particular, the Chlorellaceae family, and in particular those that belong to the Chlorella genus, such as Chlorella vulgaris. The MEVs, thus, are from microalgae that is a species of the family Chlorellaceae. Such microalgae include members of the genus Chlorella or Parachlorella. Exemplary thereof are: Chlorella ellipsoidea, Chlorella pyrenoidosa, Chlorella sorokiniana, Chlorella vulgaris, and Chlorella variabilis, a species of Parachlorella, such as Parachlorella kessleri, Parachlorella beijerinckii, and Parachlorella hussii.

[0012] The MEVs and compositions provided herein are for immunomodulation and/or vaccination. The MEVs comprise cargo that is immunomodulatory or that can vaccinate or treat or prevent a disease or condition by virtue of an immune response induced by or responsive to cargo in the MEVs. The MEVs can comprise antigen or immunogen and/or an immunomodulator, or nucleic acid encoding the antigen, immunogen, and/or immunomodulator. The vaccine is for treating, preventing, or reducing the severity of a disease, disorder, or condition; and the immunomodulator is an agent that acts on the immune system directly or indirectly; and the composition containing the MEVs is formulated for administration by a route whereby the MEVs traffic to a cell, tissue, or organ of the immune system. Exemplary of routes of administration is oral, intramuscular, and inhalation into the lung. It is shown herein that upon such administration the MEVs can deliver their cargo to targets, including intracellular receptors, such as TLRs and immune cells, that modulate or induce an innate or acquired or humoral immune response.

[0013] Microalgae extracellular vesicles (MEVs) can be manufactured on a large scale. MEVs are exogenously loaded (exo-loaded) with the bioactive molecule cargo. The MEVs can be endogenously loaded (endo-loaded) by producing them in genetically-modified microalgae that encode or express proteins, polypeptides, small peptides, various RNA molecules and/or other biomolecules that the microalgae can be genetically programmed to express and thereby package in MEVs. The MEVs provided herein are vaccines and/or are for delivery of antigens, immunogens, immunomodulators, and combinations thereof. The cargo can be polypeptides, proteins, or peptides, and immunogenic or antigenic fragments, or can comprise nucleic acid, DNA or RNA, encoding the products. The MEVs are in compositions formulated, for example, for oral administration, or mucosal administration, or for subcutaneous administration, or intramuscular administration, or for inhalation, and can be for delivery to mucosal tissues. Further description is provided below and in the sections that follow. Routes of administration and trafficking patterns are described. Of interest for the MEV vaccines is oral administration. As shown and described herein, MEVS can be orally administered, and they traffic through the gut-associated lymphoid tissue (GALT) and ultimately to the spleen and immune system.

[0014] The MEVs can be used to deliver antigenic payloads for use as vaccines for administration orally or intramuscularly, or other routes. They also can be used to modulate innate immune responses via targeted activation or inactivation of particular toll-like receptors (TLRs).

[0015] As provided and shown herein, the MEVs can be administered by various routes, including orally, by inhalation into the lungs, and/or intramuscularly, to deliver payloads to modulate the immune system, such as for the delivery of vaccines, such as antigens, and immunomodulatory agents that affect the immune system. For example, MEVs can be delivered into the lungs by inhalation, and into the gut, particularly into gut-associated lymphoid tissue GALT, by oral administration. GALT immune cells traffic the internalized MEVs to the spleen. From the GALT, the MEVs trigger a humoral and cellular response against antigenic payloads. MEVS do not traffic to the liver following oral administration.

[0016] In the intestine, MEVs are internalized by dendritic cells and resident macrophages. By oral-intestinal administration, antigen-loaded MEVs elicit an immune response against the antigenic payload. The humoral response includes strong class switching from IgG to IgA, indicating generation of antigen-specific mucosal immunity. There was no observed neutralizing response to MEVs that were administered orally.

[0017] It is shown herein, that, when administered by intramuscular (IM) administration, the MEVs elicit a humoral immune response against an antigenic payload. A significant isotype class switching to IgA antibodies, from IgG, occurs. The examples show an antigen-mediated antigen-specific humoral response (see, e.g., FIGS. 14A-14C, and accompanying description).

[0018] As described and shown herein that MEVs, not only can be used to deliver payloads into cells, they also have the, heretofore rare, capacity to reach endosomes, including endosomes that host toll-like receptors (TLRs). They can deliver to intracellular TLRs modulators of TLRs, to thereby modulate pathways that involve TLRs. The MEVs, for example, can be loaded with agonists and/or antagonists of endosomal TLRs, such as TLR3 and TLR9. MEVs loaded with modulators of endosomal TLRs can trigger (or inhibit) TLR-dependent signaling pathways in epithelial cells, including those in the lungs and intestine, and in immune cells, such as in macrophages. MEVs can be used to activate/inactivate intracellular TLRs in cells, including intestinal epithelial cells, lung epithelial cells, and monocytes.

[0019] It is shown herein that MEVs can effectively reach and modulate endosomal/intracellular TLRs, as exemplified by modulation of TLR9 and TLR3. This can be effected in vivo by oral administration of the MEVs. It is shown herein that: (1) the modulation of TLRs by the payload (cargo) carried by the MEVs, leads to the triggering of signaling pathways downstream from the TLRs; and (2) the signaling pathways lead to the (up and down) regulation of immune mediators, such as inflammatory and non-inflammatory cytokines.

[0020] It is shown herein that through the specific payloads carried by the MEVs, the inflammatory and/or anti-inflammatory response or state can be modulated, such as by oral administration or delivery of ligands by MEVs into cells, such as by MEVs containing or encoding agonists and antagonists of TLRs. Through the delivery of the payloads carried by the MEVs, an innate immune response can be elicited. Additionally, through delivery of specific payloads carried by the MEVs, a humoral and a cellular response, an “acquired response” can be elicited.

[0021] The MEVs can be exogenously loaded following isolation or partial purification/isolation of the MEVs from microalgae by contacting the MEVs with the cargo to produce the compositions in which substantially all of the MEVs have substantially the same exogenously-loaded heterologous cargo. The biodistribution pattern does not depend upon the manner in which the MEVs are loaded (see e.g., Example 14, in which exogenously and endogenously loaded MEVs (as a control) deliver biologically active cargo).

[0022] The MEVs provided herein have unique biodistribution patterns, which are a function of the route of administration. Biodistribution of the MEVs is different from mammalian EVs and other EVs and/or nanoparticles. For example, systemically delivered mammalian EVs accumulate in the liver, kidneys, and spleen. Some mammalian-derived secreted EVs have limited pharmaceutical acceptability (see, e.g., International PCT Publication No. WO2021/122880). While others have shown that certain photosynthetic microalgae release EVs into growth medium, there is no description or understanding of the use of such EVs as drugs or as drug delivery vehicles; there is no description of or understanding of their fate upon administration. It is shown herein that MEVs upon administration via various routes are distributed to organs and tissues differently from mammalian EVs. As one example, while mammalian EVs, with the exception of bovine milk EVs, cannot be administered orally because they do not survive the harsh environment of the stomach, MEVs can be orally administered and delivered to the intestine, from where they traffic to the spleen, including the white spleen.

[0023] The MEVs are loaded with a variety of cargos (also referred to as “payloads”), including, but not limited to, RNA, such as inhibitory RNAs and other RNA products, oligonucleotides, plasmids, peptides, proteins, and/or small molecules. As shown herein, the MEVs can deliver the cargo to organs, tissues, and cells, and can be targeted by the route of delivery, where they can be delivered. It is shown herein that the MEVs, including those from the order Chlorellales, in particular, the Chlorellaceae family, and in particular those that belong to the Chlorella genus, such as Chlorella vulgaris. The Chlorellaceae family MEVs, including the Chlorella MEVs, have a striking capacity to pass through stringent natural barriers, such as the digestive tract, and olfactory neurons, that are not shared by other extracellular vesicles (EVs) from other sources, including mammalian EVs.

[0024] As described herein, the MEVs can be exogenously loaded (exo-loaded) with a diversity of biologically active molecules, such as siRNA, mRNA, plasmids, ASO, peptides, proteins, and/or small molecules, which allows for a variety of therapeutic, diagnostic, and other uses. The MEVs also can be loaded endogenously by the microalgae in which they are produced (see, description herein, see, also, U.S. provisional application Ser. No. 63/349,006, filed on Jun. 3, 2022). As shown herein, MEV biodistribution is determined by the route of administration. Thus, MEVs can deliver their cargo to a variety of tissues and organs, including, for example, to the lungs, to the intestine, to the GALT, to the spleen, to the liver, and to the brain, depending on whether they are administered intratracheally, orally, intravenously, or intranasally, or inhaled.

[0025] As demonstrated herein the MEVs have many uses, including therapeutic uses, including delivery of therapeutics for treatment and/or prevention (including reducing the risk or severity) of diseases, disorders, and conditions. These uses include therapeutic uses, including immunomodulation, immuno-oncology, treatment of genetic or metabolic disorders, neurologic disorders, psychiatric disorders, respiratory disorders, among others. Of particular interest herein, and described in detail in sections below, the MEVs can be loaded with cargo, such as antigens or nucleic acid encoding antigens for use as vaccines, and also for delivery of immunomodulators to organs, tissues, and cells of the immune system or that modulate the immune system.

[0026] Cargos (also referred to as “payloads”), include, but are not limited to, RNA, such as inhibitory RNAs and other RNA products, oligonucleotides, plasmids, peptides, proteins, and small molecules. Exogenously-loaded MEVs can be loaded with almost any molecule of interest; endogenously-loaded MEVs, where the microalgae cells are genetically-modified to express or encode a product produce MEVs that contain cargo, such as RNA, DNA, peptides, small peptides, polypeptides, and proteins that are produced and packaged in EVs by the microalgae.

[0027] The MEVs can deliver the cargo to organs, tissues, and cells, and can be targeted by the route of delivery, where they can be delivered. It is shown herein that the MEVs, including the Chlorella MEVs, have a striking capacity to pass through stringent natural barriers, such as the digestive tract, that is not shared by other extracellular vesicles (EVs) from other sources, including mammalian EVs. These properties are exploited herein for delivery of vaccines and immunomodulatory therapeutics. For use as vaccines and for delivery of immunomodulatory therapeutics the MEVs generally are administered orally or intramuscularly. The fate of MEVs upon oral or intramuscular (IM) administration is described in the copending applications, noted herein, with inventors and applicants in common and also described herein and in Examples below.

[0028] Provided are compositions that contain MEVs, such as exogenously cargo-loaded MEVs, particularly those produced by the order Chlorellales, in particular the Chlorellaceae family, and in particular the Chlorella genus, such as Chlorella vulgaris. The compositions include pharmaceutical compositions that can be formulated for a particular route of delivery.

[0029] Methods for loading the MEVs are described. The cargos are bioactive molecules or combinations thereof, including biomolecules and small molecules. The cargos include, for example, biomolecules, including biopolymers, such as DNA and RNA, proteins, protein complexes, protein-nucleic acid complexes, plasmids, and also include small molecules, such as small molecule drugs. The bioactive molecules include therapeutics, such as anti-cancer compounds and biomolecules, such as RNAi, oligonucleotides, and proteins, and complexes, and diagnostic molecules, such as detectable markers, molecules that are cosmetics, and molecules that act as anti-infectives for humans, animals and plants. Methods of treatment of diseases and disorders, including pathogen infections and cancers, and uses for the MEVs for treatment for the diseases and disorders are provided as are methods of diagnosis.

[0030] Target tissues for treatment and/or delivery include, for example, epithelia and mucosa cells (e.g., any kind of either external or internal mucosa: mouth, gut, uterus, trachea, bladder, and others), endothelial cells, sensory cells (e.g., visual, auditory), cancer cells, tumor cells, blood cells, blood cell precursors, neural system cells (e.g., neurons, glial cells and other CNS and peripheral nervous cells), cells of the immune system (e.g., lymphocytes, immuno-regulatory cells, effector cells), germ cells, secretory cells, gland cells, muscle cells, stem cells, including, for example, embryonic or tissue specific stem cells, liver cells, infected cells, such as cells infected with virus, bacteria, fungi, or other pathogens, native cells, and NS genetically engineered cells.

[0031] Provided are compositions that contain isolated microalgae extracellular vesicles (MEVs), where the microalgae is a species of the genus Chlorella; and the composition is formulated for administration to a subject. The Chlorella extracellular vesicles can contain a heterologous bioactive cargo molecule that has been introduced into the isolated extracellular vesicles, whereby the vesicles in the composition that contain heterologous bioactive molecule cargo contain the same bioactive molecule cargo, where: the cargo molecule is heterologous to Chlorella; and the bioactive cargo is a biomolecule or a small molecule.

[0032] For all embodiments, the Chlorella is any species of Chlorella, such as, but not limited to, Chlorella selected from among Chlorella ellipsoidea, Chlorella pyrenoidosa, Chlorella sorokiniana, Chlorella vulgaris, and Chlorella variabilis. In particular embodiments, the Chlorella is Chlorella vulgaris.

[0033] Provided are compositions that contain isolated microalgae extracellular vesicles (MEVs), where the microalgae is a species of Chlorella; the MEVs in the composition contain heterologous bioactive molecule cargo that has been introduced into the isolated MEVs, whereby the vesicles in the composition that contain the heterologous bioactive molecule cargo contain the same cargo. The cargo is heterologous, not endogenous, to Chlorella; and the cargo is a biomolecule or a small molecule drug. Each of the MEVs that contain cargo can comprise a plurality of different heterologous cargos.

[0034] Cargo includes, for example, proteins, peptides, and nucleic acids. The bioactive molecules can be synthetic, naturally-occurring, and/or modified to alter a property or activity. Included are any molecules that have been used as drugs or therapeutics or diagnostics or cosmetics or in industry. The cargo can be, but is not limited to, a therapeutic for treating or preventing a disease or disorder or condition, or treating or preventing a symptom thereof. The cargo can be a nucleic acid molecule, a polypeptide, a protein, a plasmid, an aptamer, or an antisense oligonucleotide.

[0035] The cargo in the MEVs in the compositions can comprise a biopolymer. Biopolymers include a naturally-occurring biopolymers, or synthetic biopolymers, or modified biopolymers. The biopolymer can be a nucleic acid or protein that includes modifications, where the modifications comprise insertions, deletions, replacements, and transpositions of nucleotides or amino acid residues, and/or, where the biopolymer is a protein, the modifications also can comprise post-translational modifications. Post-translational modifications include, but are not limited to, glycosylation, hyper-glycosylation, PEGylation, sialylation, albumination, other half-life extending moieties, and other modifications that improve or alter pharmacological dynamic or kinetic properties of the protein.

[0036] Nucleic acids, such as DNA and RNA, are among the molecules that can be cargo. If the cargo is RNA or protein, it can be provided as the cargo or it can be encoded by nucleic acid that then is expressed in the organism to whom it is administered. Exemplary of RNA is inhibitory RNA (RNAi) and mRNA, including modified mRNA. RNAi includes, for example, silencing RNA (siRNA) or short-hairpin RNA (shRNA), micro-RNA (miRNA), short activating RNA (saRNA), and long non-coding RNA (lncRNA). RNA products also include double stranded RNA and ribozymes. The cargo also can be an oligonucleotide, such as an anti-sense oligonucleotide or an allele-specific oligonucleotide. The cargo can comprise a gene editing system, such as a CRISPR-Cas system, and modified and improved gene editing systems, such as CRISPR-associated and CRISPR-like systems (see, e.g., published US patent application Nos. 20200332273 and 20200332274 each to Applicant Metagenomi, Inc.).

[0037] The cargo includes therapeutic or diagnostic or theranostic proteins or peptides, protein complexes, such complexes that contain two or more proteins or a protein and nucleic acid, or a protein and aptamer, or combinations of proteins, nucleic acids, and other molecules. The cargo can be or can encode a protein that is an antibody or antigen-binding fragment thereof. Antibodies can be of any form, including single chain forms, nanobodies, camelids, and other forms, such as an scFv, a bi-specific antibody, or an antigen-binding fragment thereof. Antibodies and antigen-binding fragments thereof include a checkpoint inhibitor antibody or antigen-binding fragment thereof, or a tumor antigen-specific antibody or antigen-binding fragment thereof, or an anti-oncogene specific antibody or antigen-binding fragment thereof, or a tumor-specific receptor or signaling molecule antibody or antigen-binding fragment thereof. Exemplary antibodies and antigen-binding fragments thereof specifically bind to and inhibit one or more of CTLA-4, PD-1, PD-L1, PD-L2, the PD-1/PD-L1 pathway, the PD-1/PD-L2 pathway, HER2, EGFR, TIM-3, LAG-3, BTLA-4, HHLA-2, CD28, and other checkpoints or immune suppressors, or tumor antigens.

[0038] The cargo in the MEVs in the compositions can include immune stimulating products, or antigens, and can be used as a vaccine to induce an immunoprotective response upon administration. The cargo can be a DNA, RNA, protein, or virus. The cargo can contain nucleic acid or protein or a nucleic acid encoding a protein that is a therapeutic vaccine for preventing or treating a disease, disorder, or condition, such as cancer, or an infectious disease, or another disease treated by immune modulation.

[0039] The cargo can comprise DNA. The DNA can be a plasmid, such as one that encodes a product for expression in the animal or plant to which it is administered. Exemplary products include therapeutic products and diagnostic products. These include proteins and RNA products, including the RNA products listed above. Since the MEVs are intended for administration to animals and plants, the plasmids generally encode the product under control of eukaryotic regulatory signals and sequences, including eukaryotic promoters and translation sequences, such as RNA polymerase II and III promoters. Exemplary promoters include RNA polymerase II promoters, such as from animals, plants, and plant or animal viruses. Exemplary promoters, include, but are not limited to, a cytomegalovirus promoter, a simian virus 40 promoter, a herpes simplex promoter, an Epstein Barr virus promoter, an adenovirus promoter, a synthetic promoter, an actin promoter, and synthetic chimeric promoters. Other eukaryotic transcription sequences and eukaryotic translation sequences, include, but are not limited to, one or more of an enhancer, a poly A sequence, and/or an internal ribosome entry site (IRES) sequence.

[0040] The plasmids can encode one or two or more cargo products. For expression of the cargo product the encoding nucleic acid is operably linked to regulatory sequences recognized by a eukaryotic cell.

[0041] Methods of preparing the MEVs are described. The methods include introducing the cargo into isolated MEVs. The cargo includes any molecule for whom delivery into or onto an animal or plant is desired. Generally, the cargo is or contains or provides a bioactive molecule product, including small molecules and biopolymers. The biopolymers are naturally-occurring, or synthetic, or modified, or combinations thereof. The cargo includes a protein, nucleic acid, or small molecule. The cargo can be loaded into the MEVs by any method known to those of skill in the art; these methods include, for example, one or more of electroporation, sonication, extrusion, and use of surfactants. In some embodiments the MEVs are from Chlorella, such as but not limited to a species of Chlorella selected from among Chlorella ellipsoidea, Chlorella pyrenoidosa, Chlorella sorokiniana, Chlorella vulgaris, and Chlorella variabilis. The MEVs produced by the methods and any of the MEVs provided herein, including the compositions containing the MEVs can be used as one or more of: a method of diagnosis, a vaccine, a therapy for treatment, a diagnostic of a disease, a treatment of a disease or disorder or condition, a cosmetic, an industrial application, and/or any use known to those of skill in the art.

[0042] The cargo can provide therapeutic molecules for treatment, or can induce an immune response to serve as a vaccine. The MEVs can contain a cargo that comprises an immunostimulatory protein or an antigen or encodes an immunostimulatory protein or antigen, whereby the MEVs, upon administration are immunostimulating and elicit an innate or adaptive immune response, or the MEVs and/or the cargo can elicit an immunoprotective response to prevent or treat a disease or disorder or condition.

[0043] The compositions containing the MEVs can be formulated for administration by any route of administration. Routes include, but are not limited to, local, systemic, topical, parenteral, enteral, mucosal, oral or nasal inhalation into the lung, intranasal, vaginal, rectal, aural, oral, and other routes of administration. The MEVs can be formulated in any form, including as a tablet; as a liquid, such as an emulsion; as a powder; as a cream; as a gel; or as an aerosol; the form and formulation respective to the route of administration including for oral administration, for nebulization, or for inhalation. For vaccination routes include oral and IM.

[0044] The microalgae extracellular vesicles can be loaded by any suitable method (see, methods and MEVs described in International Patent Publication No. PCT/EP2022/070371 published as International PCT publication WO2023/001894, U.S. provisional application Ser. No. 63/349,006), which include exogenous loading following production of the MEVs and also endogenous loading in vivo by microalgae genetically modified to package nucleic acids or encoded products into MEVs.

[0045] The EVs are from microalgae, which are unicellular green algae, and include those that belong to the order Chlorellales, in particular the Chlorellaceae family, and in particular those that belong to the Chlorella genus, such as Chlorella vulgaris. The MEVs are provided in compositions formulated for nasal administration. The MEVs can be loaded exogenously after isolation, or can be endogenously loaded by genetically modified microalgae that encode and package heterologous nucleic acid and/or proteins in the MEVs in vivo. An advantage of exogenously loading (exo-loading) cargo into MEVs is that the amount of cargo/MEV can be controlled, and distribution of the exogenous cargo in the MEVs is predictable, and substantially uniform, such that the average cargo molecule or amount of cargo/MEV can be known. A large variety of bioactive molecules, including biomolecules and small molecules, such as drugs and organic compounds, can be loaded into the MEVs. The MEVs also can be endogenously loaded by genetically modified microalgae to package heterologous nucleic acids and/or proteins.

[0046] The resulting MEVs, whether endo- or exo-loaded are not toxic; they can be administered into cells in vitro, or can be administered in vivo and have distribution patterns that depend upon the route of administration. The MEV is a unique vehicle for delivery of cargo to specific tissues, which delivery depends upon the route of administration. Trafficking of MEVs in vivo, as shown, can be distinct from MEVs from other sources. For example, in contrast to mammalian EVs, MEVs can be orally administered and traffic through the GALT.

[0047] The compositions provided herein and the compositions used in the methods can be formulated as a suspension or as an emulsion, such as a nanoemulsion or as a microemulsion. Those of skill in the art understand and are familiar with the properties of nanoemulsions and microemulsions and their formation. In the compositions, the MEVs contain the bioactive cargo. For example, the MEVs can be prepared so that on the average each MEV contains a pre-determined amount of bioactive molecule, such as, for example, 1 to 100 of the bioactive molecules per MEV. The selection of amount of cargo per MEV is within the level of skill in the art and depends upon factors known to the skilled artisan, such as the particular disease, disorder, or condition treated or the use of the MEVs, the subject, the particular cargo, and other such parameters and factors. Similarly, the concentration of MEVs depends upon the particular cargo and use. For example, the concentration of MEVs in the composition can be about or at 0.1 to 10 mg/mL, and lower or higher, and intermediate concentrations. The compositions can be formulated for single dosage administration (direct administration without dilution), or multiple dose administration for administration in aliquots and/or for dilution to a desired concentration. Exemplary amounts of compositions for administration are 0.1 to 100 mL, such as 1 to 10 mL, 1 to 5 mL, 0.1 to 1 mL, and any suitable amount. The compositions can be administered as a single dose or as a series of doses or other regimen. The compositions can be administrated as part of a combination therapy protocol.

[0048] The compositions can be formulated, for example, as a liquid, a powder, a troche, granules, a liquid, an oil, a suspension, or an emulsion, suitable for intranasal administration or processing, such as by dilution or dissolution for intranasal administration.

[0049] The compositions and methods include those in which the MEVs were endogenously loaded by genetically-modified microalgae that encode the bioactive molecule or a pathway for its production. The MEVs also include those in which the cargo was exogenously loaded in purified or partially purified MEVs. The MEVS can contain a plurality of different heterologous cargos.

[0050] The microalgae used to produce the MEVs for use in the methods can be microalgae from a division of microalgae selected from among Euglenophyta (Euglenoids), Chrysophyta (Golden-brown algae and Diatoms), Pyrrophyta (Fire algae), Chlorophyta (Green algae), Rhodophyta (Red algae), Phaeophyta (Brown algae), and Xanthophyta (Yellow-green algae). For example, the microalgae is a species of Chlorophyceae or Trebouxiophyceae or Chlorophyta, such as Chlorella or Chlamydomonas.

[0051] Chlorella species include, but are not limited to, Chlorella ellipsoidea, Chlorella pyrenoidosa, Chlorella sorokiniana, Chlorella vulgaris, and Chlorella variabilis, such as Chlorella vulgaris and Chlorella variabilis. In particular embodiments, the Chlorella is Chlorella vulgaris. For example, the methods and compositions include those in which the microalgae is a species of Chlorella; the MEVs in the composition contain heterologous bioactive molecule cargo that has been exogenously introduced into the isolated MEVs, whereby, on the average, the vesicles in the composition that contain the heterologous bioactive molecule cargo contain the same heterologous cargo, where: the cargo is heterologous to Chlorella; and the cargo is a biomolecule or a small molecule drug or any cargo for use as vaccines for delivery of antigens and/or immune modulators to the immune system. Also included are methods and compositions in which the MEVs are Chlorella extracellular vesicles; the Chlorella extracellular vesicles comprise a heterologous bioactive molecule cargo that is endogenously introduced into the extracellular vesicles by the microalgae, wherein the cargo molecule is heterologous to Chlorella; and the bioactive cargo is a biomolecule for treating a disease, disorder, or condition of the immune system or involving the immune system, or that can be treated by a vaccine or immunomodulator.

[0052] Provided are methods and compositions, where: the MEVs are Chlorella extracellular vesicles; the Chlorella extracellular vesicles comprise a heterologous bioactive molecule cargo that has been introduced into isolated extracellular vesicles, whereby the vesicles in the composition that contain the heterologous bioactive molecule cargo contain, on average, the same bioactive molecule cargo, where: the cargo molecule is heterologous to Chlorella; and the bioactive cargo comprises antigens and/or immunomodulators. In other embodiments, the MEVs are Chlorella extracellular vesicles; the Chlorella extracellular vesicles comprise a heterologous bioactive molecule cargo that is endogenously introduced into the extracellular vesicles by the microalgae, whereby the vesicles in the composition that contain the heterologous bioactive molecule cargo contain the same bioactive molecule cargo, where: the cargo molecule is heterologous to Chlorella; and the bioactive cargo is a biomolecule or a small molecule. In other embodiments, the MEVs in the composition contain heterologous bioactive molecule cargo that has been exogenously introduced into the isolated MEVs, whereby on the average the vesicles in the composition that contain the heterologous bioactive molecule cargo contain the same cargo, where: the cargo is heterologous to Chlorella; and the cargo is a biomolecule or a small molecule. In other embodiments, the cargo is endogenously introduced into the MEVs by modifying the microalgae to express or produce the cargo, such as a nucleic acid or protein, or biochemical pathway product. In exemplary embodiments, the Chlorella is Chlorella vulgaris.

[0053] Cargo includes, but is not limited to, a biomolecule, a biopolymer, such as a naturally-occurring biopolymer, or is a synthetic biopolymer, or is a modified biopolymer, such as, for example, a nucleic acid molecule, a polypeptide, a protein, a plasmid, an aptamer, or an antisense oligonucleotide. Cargo includes, but is not limited to, DNA or RNA, such as, for example, inhibitory RNA (RNAi), mRNA or modified mRNA, silencing RNA (siRNA), short-hairpin RNA (shRNA), micro-RNA (miRNA), self-amplifying RNA, short activating RNA (saRNA), long non-coding RNA (lncRNA), a ribozyme, or a double-stranded RNA. Cargo includes oligonucleotides, such as an anti-sense oligonucleotide or an allele-specific oligonucleotide or an anti-sense oligonucleotide (ASO), a gene editing system, such as for example a CRISPR-CAS system, a CRISPR-associated or CRISPR-like system(s). The cargo can comprise DNA, such as a plasmid, where the plasmid encodes the therapeutic and/or detectable or diagnostic product, or an RNA product, such as RNAi and the forms of RNA noted above, including an anti-sense oligonucleotide or a ribozyme or a double-stranded RNA. The plasmid can encode the cargo product under control of a eukaryotic promoter, such as an RNA polymerase II or III promoter, such as a eukaryotic virus promoter, such as, for example, a cytomegalovirus promoter, a simian virus 40 promoter, a herpes simplex promoter, an Epstein Barr virus promoter, an adenovirus promoter, a synthetic promoter, and other promoters, such as an actin promoter, or a synthetic chimeric promoter. The plasmid can also comprise other regulatory sequences for expression, such as other eukaryotic transcription sequences and eukaryotic translation sequences. The MEV cargo can comprise a small molecule for effecting treatment or detection or diagnosis or monitoring of a disease, disorder, or condition.

[0054] The MEVs can comprise two or more cargo products. Cargo can comprise a therapeutic product, or a diagnostic product, or a detectable product, or combinations thereof, for detecting, diagnosing and/or monitoring a disease, disorder, or condition involving the immune system or for modulating the immune system, including as a vaccine. The cargo can comprise one or more of bioactive small molecules, peptides (polypeptides, proteins), RNAs (mRNAs, siRNAs, miRNAs, lncRNAs), DNAs (anti-sense oligonucleotide (ASOs), plasmids, DNA fragments), and gene editing complexes. Cargo can comprise, for example, an immunomodulatory compound, and a combination of the immunomodulatory compound and an antigen, or antigen, or nucleic acid encoding the compound and/or antigen.

### MEVs for Vaccination and Immunomodulation

[0055] Provided are vaccine compositions that contain an MEV or MEVs containing cargo that is effective for vaccination and/or immune modulation. Vaccines can be used for treating or preventing, including reducing the risk of, or reducing the severity of a disease, disorder, or condition. The diseases, disorders, and conditions include, for example, infections, cancers, and other diseases, disorders, and conditions that can be treated by modulating the immune system.

[0056] The vaccine compositions include compositions comprising an MEV or MEVs, where: the MEV comprises cargo that comprises an antigen or immunogen and/or an immunomodulator, or comprises nucleic acid encoding the antigen, immunogen, and/or immunomodulator; the vaccine is for treating, preventing, or reducing the severity of a disease, disorder, or condition; the immunomodulator is an agent that acts on the immune system directly or indirectly; and the composition is formulated for administration by a route whereby the MEVs traffic to a cell, tissue, or organ of the immune system. The vaccine compositions can comprise an MEV or MEVs, where: the MEVs comprise cargo that comprises one or more of an antigen or immunogen and/or an immunomodulator, or comprises nucleic acid encoding the antigens, immunogens, and/or immunomodulators; the vaccine is for treating, preventing, or reducing the severity of a disease, disorder, or condition; the immunomodulator is an agent that acts on the immune system directly or indirectly; the composition is formulated for administration by a route whereby the MEVs traffic to a cell, tissue, or organ of the immune system. The cargo can comprise an antigen or polypeptide or portion thereof, or nucleic acid, such as mRNA or DNA, encoding the antigen or polypeptides or portion thereof. For all of these embodiments, the cargo can comprise a polypeptide or antigenic portion thereof, or an epitope or neoepitope thereof or can comprise an immunomodulator, including those described below and/or known to those of skill in the art, are a combination of a polypeptide or antigenic portion thereof, or an epitope or neoepitope thereof and an immunomodulator, or nucleic acid, such as mRNA or DNA, encoding the polypeptide or antigenic portion thereof, or an epitope or neoepitope thereof and/or the immunomodulator.

[0057] In embodiments herein, the vaccine compositions do not comprise an exogenous adjuvant or “traditional” adjuvant. As shown in the examples, the immune response to compositions comprising the MEVs and no added adjuvant, result in an immune response as robust as the immune response to adjuvant plus the same polypeptide or nucleic acid. For the compositions and the methods provided herein, the compositions do not require an exogenous adjuvant or a “traditional” adjuvant. It is shown herein that the vaccine compositions can be or are administered a plurality of times. The data show no adverse effects or immune reactions against the MEVs. Vaccine compositions provided herein result in a cellular response comprising T memory cells, T cells, and/or any other kinds of helper T cells, effector T cells, regulatory T cells or other T cells.

[0058] Exemplary cargo can comprise an antigen or polypeptide or portion thereof from a pathogen or from a tumor or cancer, or encoding nucleic acid, and/or an immunomodulator or encoding nucleic acid. Exemplary immunomodulators include, but are not limited to, a cytokine or chemokine or receptor agonist or antagonist, or a receptor, or ligand that modulate an immune response. Combinations of immunomodulators also are included. Cargo can comprise an antigen that is an immunogenic protein, polypeptide, peptide from a pathogen, or encoding nucleic acid.

[0059] Generally, the antigens from a pathogen are selected to induce a robust immune response, and can result in neutralizing antibodies. Exemplary pathogens include, but are not limited to, bacteria, such as, for example, one or more of Enterobacteriales (Shigella sp. Salmonella sp. Escherichia coli, among other species of the order), Vibrionales (Vibrio cholerae, among other species of the order), Legionellales (Legionella pneumophila, among other species of the order), Pseudomonadales (Pseudomonas aeruginosa, P syringae, Acinetobacter spp., Moraxella spp., among other species of the order), Pasteurellales (Haemophilus influenzae, Mannheimia spp., Actinobacillus spp., among other species of the order), Porphyromonas gingivalis, and or gram-positive bacteria such as Staphylococcus aureus, Staphylococcus spp., Streptococcus pneumonia, Streptococcus spp., or Bacillus spp., Listeria spp., Clostridium spp., Nocardia spp; and viruses, including, but not limited to, hepatitis viruses, herpesvirus, varicella-zoster virus (VZV), Epstein-Barr virus (EBV), human immunodeficiency virus (HIV), human T-cell leukemia virus (HTLV), respiratory syncytial virus (RSV), measles virus, influenza virus, rhinovirus, and coronaviruses, such as Severe Acute Respiratory Syndrome coronavirus (SARS-CoV), Middle East Respiratory Syndrome coronavirus (MERS-CoV), and Severe Acute Respiratory Syndrome coronavirus 2 (SARS-CoV-2). Exemplary antigens or nucleic acid encoding the antigens are selected from among the antigens and immunogenic portions thereof or epitopes thereof, see table 1, below.

TABLE 1
List of exemplary antigens for use as possible MEV cargo

| | Pathogen | |
|---|---|---|
| Antigen name | type | Species of origin |
| Heat-labile enterotoxin B subunit | Bacterial | Escherichia coli |
| Cholera toxin B (CTB) subunit | Bacterial | Vibrio cholerae |
| Extracellular capsule protein F1/ | Bacterial | Yersinia pestis |
| immune-modulator V fusion protein | | |
| Outer membrane protein receptor for | Bacterial | Shigella flexneri |
| ferrichrome | | |
| Outer membrane protein OprF | Bacterial | Pseudomonas |
| | | aeruginosa |
| N-terminal portion of the Candida | Bacterial | Staphylococcus |
| albicans agglutinin-like protein 3 | | aureus |
| (Als3p) | | |
| 27-kDa outer membrane protein | Bacterial | Salmonella enterica |
| (T2544) | | serovar Typhi |
| Hepatitis B surface antigen (HBsAg) | Viral | Hepatitis B virus |
| | | (HBV) |
| E1-E2 genome polyprotein | Viral | Hepatitis C virus |
| | | (HCV) genotype 1a |
| Inner capsid protein VP6 | Viral | Human rotavirus A |
| Outer capsid glycoprotein VP7 | Viral | Rotavirus A |
| Capsid protein | Viral | Norwalk virus (NV) |
| Spike protein S1 fragment | Viral | SARS-coronavirus |
| | | (CoV) |
| B5R antigenic ectodomain | Viral | Vaccinia virus |
| Envelope protein (E) | Viral | Japanese encephalitis |
| | | virus (JEV) |
| VP4N20 antigenic peptide | Viral | Coxsackievirus 16 |
| | | (CV-A16) |
| VP4N20 antigenic peptide | Viral | Enterovirus 71 |
| | | (EV71) |
| Minor capsid protein L | Viral | Human |
| | | papillomavirus type |
| | | 16 (HPV-16) |
| Envelope glycoprotein D | Viral | Human herpesvirus 1 |
| | | (HHV-1) |
| Envelope domain III protein | Viral | Zika virus |
| Major surface glycoprotein G | Viral | Human respiratory |
| | | syncytial virus A |
| | | (RSV strain A2) |
| Domain III fragment of dengue 2 | Viral | Dengue virus type 2 |
| envelope protein (D2EIII) | | |
| Merozoite surface protein 4 (MSP4) | Protozoan | Plasmodium |
| | | falciparum |
| Merozoite surface protein 5 (MSP5) | Protozoan | Plasmodium |
| | | falciparum |
| Trans-sialidase | Protozoan | Trypanosoma cruzi |
| A2 protein | Protozoan | Leishmania infantum |
| N-terminal portion of the Candida | Fungal | Candida albicans |
| albicans agglutinin-like protein 3 | | |
| (Als3p) | | |

[0060] These also include antigens where the sequence of the antigen is set forth in any of SEQ ID Nos:160-186 and/or is an immunogenic, antigenic, or epitope portion thereof.

[0061] The cargo in the MEV or MEVs in the vaccine compositions can comprise an immune modulator or combinations thereof or combinations thereof with an antigen or antigens. Generally, the response to the immune modulator will complement the antigen, by, for example, inducing an immune response that is enhanced or improved and/or reduces undesirable or adverse immune responses. Exemplary immune modulators include, but are not limited to, one or more of a cytokine, chemokine, co-stimulatory molecule, TNF superfamily of ligands or receptors, Toll-like receptor (TLR) agonist or antagonist, or immune checkpoint inhibitor, or a type I interferon or interferon-γ. The immune modulator can be an antibody or antigen-binding fragment thereof that specifically binds to and inhibits a receptor or ligand involved in a disease, disorder, or condition, such as one or more of CTLA-4, PD-1, PD-L1, PD-L2, the PD-1/PD-L1 pathway, the PD-1/PD-L2 pathway, HER2, EGFR, TIM-3, LAG-3, BTLA-4, HHLA-2, CD28, and other checkpoints or immune suppressors, or tumor antigens.

[0062] Exemplary vaccine compositions include cargo that comprises: an antigen or nucleic acid encoding the antigen, wherein the antigen is selected from among the antigens and immunogenic portions thereof or epitopes thereof, and an immunomodulator.

[0063] The vaccine compositions can be formulated for a route of administration, particularly routes that deliver or traffic cargo to or through cells, tissues, and/or organs of the immune system. The MEVs are unusual in that they can be administered orally where they traffic to the gut-associated lymphoid tissue (GALT), and from there to other organs of the immune system, such as the spleen, including the white spleen. They also can be administered by other routes. Provided are vaccine compositions that are formulated for oral administration, intramuscular administration, inhalation into the lungs or nose, mucosal administration, or local administration, or subcutaneous administration. Provided are vaccine compositions formulated for administration by a route that comprises the target the tissues of the spleen, and/or that targets or traverse gut-associated lymphoid tissue (GALT). The compositions can be formulated for administration by a route that comprise or target mucosal tissue. Hence provided are compositions formulated for oral administration, or formulated for administration by inhalation into the lungs or nose, or formulated for intramuscular administration. The vaccine compositions can be formulated as tablets, pills, powders, liquid solutions or suspensions (e.g., including injectable, ingestible and topical formulations, for example, eye drops, gels, pastes, creams, or ointments), aerosols (e.g., nasal sprays and inhalers), suppositories, pessaries, injectable and infusible solutions and sustained release forms.

[0064] Provided are vaccine compositions for use for oral administration for treating, preventing or reducing the severity of a disease, disorder, or condition involving a pathogen or for a disease, disorder, or condition that is cancer, or an immune system disorder. The vaccine compositions provided herein can include cargo that comprises nucleic acid encoding the antigen or portion thereof or an antigenic portion or epitope or immunomodulator, and/or cargo that comprises mRNA encoding the antigen or portion thereof or immunomodulator. The cargo can comprise DNA encoding the antigen or portion thereof or immunomodulator. The cargo can comprise a plasmid encoding the antigen or portion thereof and/or an immunomodulator. The cargo can comprise a protein antigen, or antigenic portion thereof, or an epitope.

[0065] Provided are methods of vaccination, including treatment, prevention or reduction of the severity of a disease, disorder, condition, including cancer, comprising administering any of the vaccine compositions provided herein to a subject. The methods include orally or intramuscularly administering the vaccine compositions. As discussed above and below, the compositions can be for oral administration for use for treating or preventing a disease, disorder, or condition involving a pathogen or for a disease, disorder, or condition that is cancer, or an immune system disorder. They can be for intramuscular administration for treating or preventing a disease, disorder, or condition involving a pathogen or for a disease, disorder, or condition that is cancer, or an immune system disorder. Other routes of administration also are contemplated.

[0066] It is shown herein that the vaccine compositions and methods can elicit a protective humoral response that comprises serum IgG and IgA and/or mucosal IgG and IgA, such as a protective humoral response that comprises serum IgA and/or mucosal IgA, thereby generating vaccine-induced IgA-producing memory B-cells to provide systemic and mucosal responses that protect from reinfection. These responses are observed following administration by routes that include oral and intramuscular.

[0067] The vaccine compositions and methods deliver or traffic an antigen or immunogenic portion thereof, or an epitope, or nucleic acid encoding the antigen, or immunogenic portion thereof, or epitope and an immunomodulator, to reduce or eliminate immune-tolerance to previous immunotherapies or vaccines, such as those occurring in cancer.

[0068] The MEV cargo can comprise a TLR antagonist or agonist or nucleic acid encoding the antagonist or agonist. The selection of TLR and antagonist or agonist depends upon the disease, disorder, or condition treated or prevented or at issue; for some diseases, disorders, and conditions, immunosuppression of certain responses is desirable, and for others immune stimulation or response is desirable. The TLR and agonist thereof can be, for example, one or more of

| TLR | |
|---|---|
| Member | Ligand(s)/Agonists |
| TLR1 | Triacyl lipopeptides (Pam3CSK4) |
| TLR2 | Zymosan, Porin, Modulin, Lipoproteins, Lipoteichoic acid, |
| | Diacyl lipopeptides, Atypical LPS, Peptidoglycan, Triacyl |
| | lipopeptides |
| TLR3 | dsRNA |
| TLR4 | Mannans, Taxol, LPS |
| TLR5 | bacterial flagellin, profilin, HMGB1, Small molecule agonists |
| | (CBLB502) |
| TLR6 | Zymosan, Porin, Modulin, Lipoproteins, Lipoteichoic acid, |
| | Diacyl lipopeptides (Pam2CSK4), Atypical LPS, Peptidoglycan |
| TLR7 | imidazoquinoline, loxoribine, ssRNA, bropirimine, resiquimod |
| TLR8 | ssRNA, small synthetic compounds |
| TLR9 | CpG DNA |
| TLR10 | Diacyl and Triacyl lipopeptides |
| TLR11 | Profilin-like protein, non-pathogenic bacteria. |

[0069] In other embodiments, the TLR and antagonist can be one or more of

| TLR | |
|---|---|
| Member | Ligand(s)/Antagonists |
| TLR1 | Small molecule antagonists (CU-T12-9, MMG-11) |
| TLR2 | Small Molecule Antagonists (AT1-AT8, CU-CPT22, CU-T12-9, |
| | MMG-11, NPT1220-312), Phloretin, Sulfoglycolipids |
| TLR3 | Small Molecule Antagonists (CU-CPT4a), Monoclonal |
| | antibodies (CNTO4685, CNTO5429) |
| TLR4 | Small Molecule Antagonists (Norbinaltorphimine, T4Ics, |
| | T5342126, Simvastatin |
| TLR5 | Small Molecule Antagonist (TH1020) |
| TLR6 | Simvastatin |
| TLR7 | Chloroquine, hydroxychloroquine, quinacrine |
| TLR8 | Small Molecule Antagonist (CU-CPT8m, CU-CPT9a) |
| TLR9 | Small Molecule Antagonists (NPT1220-312), chloroquine, |
| | hydroxychloroquine, quinacrine; Suppressive or inhibitory |
| | oligonucleotides |

[0070] Depending upon the disease, disorders, or conditions, and desired outcome, the cargo can comprise combinations of agonists and antagonists that activate a particular TLR and inactivate a different TLR. For example, for cancer, immunosuppression of inflammatory and other anti-bacterial type of responses can be desired; for vaccination against pathogens, bacterial and inflammatory responses can be advantageous. For autoimmune diseases, immunosuppression can be desirable.

[0071] The vaccine compositions and methods can be used to treat or prevent a disease, disorder, or condition that is an inflammatory disease, disorder or condition, or a disease, disorder, or condition in which inflammation plays a role in the etiology of the disease, disorder, or condition. The immunomodulator can be one that suppresses the inflammatory response. The disease, disorder, or condition can comprise cancer and the cargo can comprise an immunomodulator that suppresses an inflammatory response but does not suppress and anti-cancer immune response. In other embodiments, the vaccine composition can be formulated for oral administration and the disease, disorder, or condition involves the gastrointestinal tract or the immune system or the white spleen.

[0072] The MEVs for the vaccine compositions and methods provided herein can be from a microalgae, including, but not limited to, MEVS from a division of microalgae selected from among Euglenophyta (Euglenoids), Chrysophyta (Golden-brown algae and Diatoms), Pyrrophyta (Fire algae), Chlorophyta (Green algae), Rhodophyta (Red algae), Phaeophyta (Brown algae), and Xanthophyta (Yellow-green algae). For example, the MEVs can be from Chlorella, such as a species of Chlorella selected from among Chlorella ellipsoidea, Chlorella pyrenoidosa, Chlorella sorokiniana, Chlorella vulgaris, and Chlorella variabilis.

[0073] In all embodiments of the compositions and methods, the subjects include, but are not limited to, mammals, including humans and/or non-human animals. The subjects include, but are not limited to, livestock or a pet or a zoo animal or a water mammal, such as, but not limited to, a non-human animal that is a dog, a cat, a gerbil, a rabbit, or other furry animals, an ovine, a bovine, a non-human primate, a goat, an elephant, a dolphin, or a whale.

[0074] All claims as filed herein are incorporated by reference into this section.

### BRIEF DESCRIPTION OF THE DRAWINGS

[0075] FIG. 1 depicts an exemplary elution profile for higher purity of MEV preparations, where MEVs previously concentrated by TFF and purified by ultracentrifugation and formulated in PBS at concentration of 10¹¹ to 10¹³ per mL are seeded in a pre-packed column qEV1 from IZON. The MEVs are eluted using PBS solution. The elution fractions of 0.5 mL are collected. MEVs are recovered in the first fractions as shown in the figure. The most concentrated fractions (4-5) are pooled and stored at 4° C. before use. [see, Example 1]

[0076] FIG. 2 provides exemplary images of MEVs obtained using Transmission Electron Microscopy (TEM). [see, Example 2]

[0077] FIGS. 3A-3B provides exemplary images obtained with MEVs labelled with lipophilic dyes by confocal microscopy. FIG. 3A MEVs labelled with PKH26. FIG. 3B MEVs labelled with DiD. [see, Example 2]

[0078] FIGS. 4A-4C depict MEVs uptake analysis by confocal microscopy. Uptake of MEVs labelled with PKH26 into cells after 16 hs of incubation. FIG. 4A layout of cells (2D image). FIG. 4B one cell (2D image). FIG. 4C one cell (3D image). [see, Example 2]

[0079] FIG. 5 Distribution of labelled MEVs with lipophilic dyes by cytometry. [see, Example 2]

[0080] FIGS. 6A-6B depict MEVs uptake analysis by cytometry. Uptake of MEVs (labelled with lipophilic dyes) in different cell types as percentage of fluorescent cells. FIG. 6A epithelial cells. FIG. 6B monocytes. [see, Example 2]

[0081] FIG. 7 provides representative patterns of biodistribution according to the route of administration, for the Intravenous (IV), Intratracheal (IT) and Per os (PO) routes. [see, Example 6A]

[0082] FIG. 8A depicts the kinetics of accumulation in liver, lungs, and spleen (average of 6 animals) after intravenous administration, as described in Example 6A.

[0083] FIG. 8B depicts the kinetics of accumulation in lungs, spleen, and intestine (average of 6 animals) Per os administration, as described in Example 6A.

[0084] FIG. 8C depicts the kinetics of accumulation lungs and kidneys (average of 4 animals) after intranasal administration, as described in Example 6A.

[0085] FIG. 8D depicts the kinetics of accumulation in lungs, spleen, and intestine (average of 3 animals) after intratracheal administration, as described in Example 6A.

[0086] FIG. 9 shows a microscopic image of mouse intestinal epithelium 8 hours after PKH26-labeled MEV administration by Per os route. [see, Example 6B]

[0087] FIGS. 10A-B show a microscopy image of mouse GALT tissue 8 hours after PKH26-labeled MEV administration by Per os route. FIG. 10A depicts Hematoxylin and Eosin staining of intestine (G=GALT tissue). FIG. 10B depicts DAPI (nuclei) staining, and MEV-PKH26 fluorescence (for example portion labeled “ro”). [see, Example 6B]

[0088] FIGS. 11A-B show a microscopy image of mouse spleen 24 h after PKH26-labeled MEV administration by Per Os route. FIG. 11A depicts spleen pulp with DAPI (nuclei) staining, and MEV-PKH26 is indicated by fluorescence (lighter gray staining/puncta). FIG. 11B is a diagram showing the migration of MEVs from the GALT to the spleen. [see, Example 6B]

[0089] FIG. 12 shows whole-body bioluminescence imaging of a representative animal treated with MEVs loaded with luciferase mRNA. [see, Example 7]

[0090] FIG. 13 depicts whole-body bioluminescence imaging of a representative animal treated with MEVs loaded with luciferase enzyme. [see, Example 7]

[0091] FIGS. 14A-C show responses to antigen (ovalbumin (OVA)) administered orally or intramuscularly with adjuvant compared to the responses following administration of MEVs loaded with OVA by the same routes. [see, Example 9]

[0092] FIGS. 15A-B shows non-hematological toxicity response in mice after administered orally or intratracheally with MEVs. FIG. 15A depicts evaluation of MEV's toxicity by chemistry parameters: ALAT, ASAT, urea and creatine. FIG. 15B depicts evaluation of MEV's toxicity by hematology parameters: RBCs, hemoglobin, hematocrit, MCV and Eosinophils. Group 1: mice received 100 μl of PBS (White bars) by PO delivery. Group 2: mice received 100 μl of 4*10¹¹ MEVs/mouse by PO delivery (bar with black and white tiles). Group 3: mice received 100 μl of 4*10¹² MEVs/mouse by PO delivery (bars with vertical lines). Group 4: mice were administered 100 μl of 4*10¹¹ MEVs/mouse by IT delivery (squared bars). Data were obtained for 6 mice per group for each parameter. ALAT: Alanine Aminotransferase. ASAT: Aspartate Aminotransferase. MCV: Mean Corpuscular Volume. PO: per os (oral delivery). IT: Intratracheal. [see, Example 18]

[0093] FIG. 16 depicts the immune response to immunization with an adjuvant plus and antigen. MEVs plus antigen follow a similar route, except that MEVs contain the antigen (or nucleic acid encoding the antigen) as cargo inside the MEV. The antigen can be expressed on the surface of the MEV, or otherwise delivered into the host cell as a protein or nucleic acid (cDNA or mRNA or eRNA). MEVs provide delivery systems.

[0094] FIGS. 17A and 17B show MEVs and their interactions with TLRs and ligands therefor. [see, Examples 17A; 17B]

[0095] FIGS. 18-FIG. 26B present the T-cell response following intramuscular administration of MEVs and MEVs containing exemplary antigen (OVA).

[0096] FIG. 18 is a drawing of scatter density plots of results following IM administration: Gating for CD44/CD62L. [see, Example 8]

[0097] FIG. 19A is a bar graph depicting IM administration results: CD44/CD62L (spleen). [see, Example 8]

[0098] FIG. 19B is a bar graph depicting IM administration results: CD44/CD62L (spleen). [see, Example 8]

[0099] FIG. 20A is a bar graph depicting IM administration results: CD44/CD62L (lymph nodes (LN)). [see, Example 8]

[0100] FIG. 20B is a bar graph depicting IM administration results: CD44/CD62L (lymph nodes (LN)). [see, Example 8]

[0101] FIG. 21A is a drawing showing scatter density plots of results following IM administration: Gating for CD44(hi)/CD49d. [see, Example 8]

[0102] FIG. 21B is a drawing showing scatter density plots of results following IM administration: Gating for CD44(hi)/CD49d. [see, Example 8]

[0103] FIG. 22A is a bar graph depicting IM administration results: CD44(hi)/CD49d (spleen). [see, Example 8]

[0104] FIG. 22B is a bar graph depicting IM administration results: CD44(hi)/CD49d (spleen). [see, Example 8]

[0105] FIG. 23A is a bar graph depicting IM administration results: CD44(hi)/CD49d (LN). [see, Example 8]

[0106] FIG. 23B is a bar graph depicting IM administration results: CD44(hi)/CD49d (LN). [see, Example 8]

[0107] FIG. 24A is a drawing showing a scatter density plot of the results following IM administration: Gating for CD44(hi)/CD11a(hi). [see, Example 8]

[0108] FIG. 24B is a drawing showing a scatter density plot of the results following IM administration: Gating for CD44(hi)/CD11a(hi). [see, Example 8]

[0109] FIG. 25A is a bar graph depicting IM administration results: CD11a/CD49d (spleen). [see, Example 8]

[0110] FIG. 25B is a bar graph depicting IM administration results: CD11a/CD49d (spleen). [see, Example 8]

[0111] FIG. 26A is a bar graph depicting IM administration results: CD11a/CD49d (LN). [see, Example 8]

[0112] FIG. 26B is a bar graph depicting IM administration results: CD11a/CD49d (LN). [see, Example 8]

[0113] FIGS. 27-FIG. 30 present the macrophage RAW264.7 response following incubation at different timepoints of MEVs labelled with pKH26 or loaded with TLRs agonists.

[0114] FIGS. 27-27B depict MEVs internalization into RAW264.7 macrophage M0 mice cells.

[0115] FIG. 27A provides images of confocal microscopy (63× magnification) of MEV penetration into RAW264.7 cells (PKH26 fluorescence) at different time points. White arrows show, as indicated, the presence of the MEVs into the cells. FIG. 27B shows the quantification (of the total fluorescence intensity (MFI) from the PKH26) of 4 campus per treatment after confocal microscopy of MEVs penetration into RAW264.7 cells (PKH26 fluorescence) at different time points. [see, Example 17A]

[0116] FIG. 28 MEVs payload delivery into RAW264.7 cells. Images of confocal microscopy (63× magnification) of MEV penetration and payload delivery into RAW264.7 cells (FITC—fluorescence) after 16 h of incubation for all conditions. LPS, an agonist of TLR4 (line 2), and Poly (I.C), an agonist of TLR3 (line 4), are used here as a positive control. In this picture, fluorescence comes from the payload (poly IC labelled with FITC). [see, Example 17A]

[0117] FIGS. 29A-29B depict activation of NF-Kb intracellular pathway after MEV-mediated delivery of an agonist of TLR3 into RAW264.7 cells. FIG. 29A provides images of confocal microscopy (63× magnification) of activation of NF-Kb pathway on RAW264.7 cells after stimulation of TLR3. The red fluorescence corresponds to anti-pNF-Kb p65 MoAb (serine536). In this picture, fluorescence comes from the activated NF-Kbp65. FIG. 29B shows a Western Blot of total proteins from cell lysates of RAW264.7 cells after different treatments. Activation of NF-Kb pathway on murine macrophage M0 cells after stimulation of TLR3. [see, Example 17A]

[0118] FIGS. 30A-30B show differentiation of RAW264.7 cells into Macrophages and Dendritic Cells by stimulation of MEVs loaded with TLR3 agonist. FIG. 30A provides images of microscopy (20× magnification) of morphological differentiation into macrophages (M1 or M2) and dendritic cells of RAW264.7 cells (M0) after MEVs penetration and payload delivery. The payload poly-IC (HMW) is an agonist of TLR3.

[0119] FIG. 30B shows magnification by software of Image of condition 6 of A. [see, Example 17A]

[0120] FIGS. 31-FIG. 32 present the human epithelial cells response following incubation at different timepoints of MEVs labelled with pKH26 or loaded with TLRs agonists.

[0121] FIGS. 31A-31E show MEVs internalization and payload delivery into human epithelial cells in vitro. FIG. 31A and FIG. 31C provide images of confocal microscopy (63× magnification) of MEV penetration into intestinal epithelial cells (pKH26 fluorescence) at different time points. White arrows show, as indicated, the penetration of MEVs into the cells. FIG. 31B and FIG. 31D show the quantification (fluorescence intensity (MFI)) of 4 campus per treatment after confocal microscopy of MEVs penetration into intestinal epithelial cells (pKH26 fluorescence) at different time points. FIG. 31E provides images of confocal microscopy (63× magnification) of MEV penetration and payload delivery into lung epithelial cells (FITC—fluorescence) at different time points. White arrows show, as indicated, the penetration of MEVs and payload delivery into the cells. [see, Example 17B]

[0122] FIGS. 32A-32E show payload delivery and biological activity of loaded-MEV penetration into human epithelial cells in vitro. FIG. 32A provides images of confocal microscopy (63× magnification) of activation of NF-Kb pathway on BEAS-2B cells after stimulation of TLR-3. The red fluorescence corresponds to anti-pNF-Kb p65 MoAb (serine536). FIG. 32B shows a Western Blot of total proteins from cell lysates of BEAS-2B cells after different treatments. Activation of NF-Kb pathway on BEAS-2B cells after stimulation of TLR-3. FIG. 32C shows a Western Blot of total proteins from cell lysates of FHC cells after different treatments. Activation of NF-Kb pathway on FHC cells after stimulation of TLR-3. FIG. 32D shows a Western Blot quantification. Activation of NF-Kb pathway on FHC cells after stimulation of TLR-3. The quantification was normalized using the value of control cells (non-treated cells) as 1, the values of all condition are relative to the control. FIG. 32E provides images of confocal microscopy (63× magnification) of activation of IRF-3 pathway after stimulation of TLR-9 on FHC cells. The red fluorescence corresponds to anti-pIRF3 MoAb (serine396). [see, Example 17B]

### DETAILED DESCRIPTION

### Outline

[0123] A. DEFINITIONS
[0124] B. MICROALGAE AND OVERVIEW
[0125] C. EXTRACELLULAR VESICLES
   [0126] 1. Types of Extracellular Vesicles (EVs)
      [0127] a. Exosomes
      [0128] b. Microvesicles
      [0129] c. Apoptotic Bodies
   [0130] 2. Uptake of Evs
   [0131] 3. General Methods for Isolating Evs
      [0132] a. Ultracentrifugation
      [0133] b. Size-Based Techniques
      [0134] c. Immunoaffinity Capture-Based Techniques
      [0135] d. Exosome Precipitation
      [0136] e. Microfluidic Based Isolation Techniques
   [0137] 4. Microalgae and Microalgae-Derived Extracellular Vesicles (MEVs)
   [0138] 5. Green algae-Chlorella species
      [0139] a. Life Cycle
      [0140] b. Genomic Analyses of Chlorella Species
      [0141] c. Commercial and Biotechnological Uses of Chlorella
      [0142] d. Chlorella MEVs
[0143] D. EXOGENOUSLY LOADED MICROALGAE EXTRACELLULAR VESICLES (MEVS), CARGO, AND TARGETS
   [0144] 1. Isolation of MEVs
   [0145] 2. MEV Loading and Cargos
   [0146] 3. Generation of Payload-Loaded MEVs
      [0147] a. Electroporation
      [0148] b. Sonication
      [0149] c. Extrusion
      [0150] d. Surfactants
      [0151] e. Other Methods
   [0152] 4. Exemplary Cargo and Exemplary Uses of the Exogenously Loaded MEVs
      [0153] a. Cargo
         [0154] 1) RNA Cargo
         [0155] 2) Antibody Cargo
   [0156] b. Diseases and Methods of Treatment
[0157] E. ENDOGENOUSLY LOADED (ENDO-LOADED) MICROALGAE EXTRACELLULAR VESICLES (MEVS), CARGO, AND TARGETS
   [0158] 1. Choice and preparation of Cargo
   [0159] 2. Genetic engineering of producer cells
   [0160] 3. Cargo
      [0161] 1) Protein Cargo
[0162] F. PHARMACEUTICAL COMPOSITIONS, FORMULATIONS, KITS, ARTICLES OF MANUFACTURE AND COMBINATIONS
   [0163] 1. Pharmaceutical Compositions and Formulations
   [0164] 2. Articles of Manufacture/Kits and Combinations
   [0165] 3. Administration of Cargo=Loaded MEVs and Routes of Administration
   [0166] 4. Combination Therapies
[0167] G. BIODISTRIBUTION OF MEVs FOLLOWING ADMINISTRATION VIA VARIOUS ROUTES
   [0168] 1. Biodistribution of mammalian Evs
   [0169] 2. Microalgae Evs Biodistribution
      [0170] a. Oral Administration
         [0171] 1) Components of the Lymphatic System
         [0172] 2) Targeting GALT
      [0173] 3. Diseases and conditions treated by MEVs
[0174] H. THE IMMUNE SYSTEM AND MEVs FOR USE AS VACCINES AND FOR DELIVERY OF IMMUNOMODULATORS
   [0175] 1. Immune system and vaccines
   [0176] 2. Vaccines—oral, intramuscular, and local administration, including mucosal administration, such as inhalation to the lungs and nasal tract
      [0177] a. MEV-based oral vaccines
      [0178] b. MEV-mediated immunization upon oral delivery
      [0179] c. MEV-mediated immunization and mucosal immunity
      [0180] d. MEV-mediated immunization upon intramuscular delivery
      [0181] e. Adjuvants
      [0182] f. Isotype switching
   [0183] 3. MEVs and cargo
   [0184] 4. Antigens
   [0185] 5. Immunomodulators
      [0186] a. MEV-mediated intracellular signaling and other receptors and ligands for preventing, reducing the risk of, or treating a disease, disorder, or condition
[0187] I. FORMULATIONS, ROUTES OF ADMINISTRATION, AND DISEASE AND DISORDERS
[0188] J. EXAMPLES

### A. DEFINITIONS

[0189] Unless defined otherwise, all technical and scientific terms used herein have the same meaning as is commonly understood by one of skill in the art to which the invention(s) belong. All patents, patent applications, published applications and publications, GenBank® sequences, databases, websites, and other published materials referred to throughout the entire disclosure herein, unless noted otherwise, are incorporated by reference in their entirety. In the event that there are a plurality of definitions for terms herein, those in this section prevail. Where reference is made to a URL or other such identifier or address, it is understood that such identifiers can change, and particular information on the internet can come and go, but equivalent information can be found by searching the internet. Reference thereto evidences the availability and public dissemination of such information.

[0190] As used herein, cargo refers exogenous molecules, such as bioactive molecules, including biomolecules, and small molecules, that are loaded into the microalgae extracellular vesicles (MEVs) provided herein after the MEVs have been isolated. This includes cargo that is heterologous to the MEVs.

[0191] As used herein, in general, heterologous with respect to cargo in an MEV refers to cargo in the MEVs that does not naturally-occur in the MEVs but is loaded exogenously, as discussed above. It also refers to cargo in MEVs that have been loaded endogenously in the MEVs by genetically-modified microalgae. MEVs with heterologous cargo, comprise cargo that does not occur naturally in the MEVs.

[0192] As used herein, a bioactive molecule or bioactive agent refers to any molecule or agent that can have a biological activity, such as therapeutic activity, or as a detectable marker, or that can act in vivo on a subject. Bioactive agents and molecules include biomolecules, such as DNA, RNA, proteins, other biopolymers, and small molecules, such as small molecule drugs and pharmaceuticals, immunogens, and any molecules that would be delivered to a subject, such as a human or other animal or a plant or a microorganism (bacteria or other), in connection with a therapy, a diagnostic application, or other such uses, such as a cosmetic. The bioactive agent or molecule can function as or have an activity as, for example, a therapeutic, an immunogen, a diagnostic, a detectable marker, or a cosmetic. The bioactive molecules for use herein are any that can be loaded into a microalgae extracellular vesicle (MEV).

[0193] As used herein, a biomolecule refers to any biologically active biopolymer or molecule that occurs, or can occur, in a living organism or virus or that is a modified form of such biopolymer or molecule. Biomolecules, thus, include modified naturally-occurring biomolecules, such as, for example proteins that include a modified primary sequence, such as by deletions, insertions, and/or replacements of amino acids to alter the primary sequence, and or by modification, such as post-translational modifications of the protein.

[0194] As used herein, when it is stated that MEVs have the same or substantially the same loaded cargo or amount thereof, it is understood that this refers to an average among the population of MEVs in a composition. It is understood, that when MEVs are loaded exogenously the ratio of cargo/MEV can be selected so that each MEV has, on average, a pre-determined amount of cargo. As a simple example, to load an average of one molecule of cargo/MEV, the skilled person could calculate the amount of cargo to load into a composition of MEVs, and understands that in the composition of MEVs, some would have more than one molecule of cargo/MEV, and others would have none. On average, the MEVs would have one molecule of cargo/MEV. The skilled person understands, that, in general, the amount of cargo/MEV will be more than the one molecule/MEV, and that the amount of cargo depends upon a variety of parameters, including the cargo, the target tissues and/or cells, the disease, disorder, or condition treated, and the subject treated. Generally, more than one molecule of cargo per MEV, on the average, such as at least 10 or about 10 molecules/MEV are loaded. Substantially more cargo, 100, 500, 1000, 10⁴ molecules/MEV and more, also can be loaded. The amount loaded depends upon the target, disease, disorder, or condition, the subject, and the cargo, and the capacity of the MEV. It is within the skill in the art to select the amount.

[0195] As used herein, a subject is any organism, generally an animal or plant, into which or on which the composition containing the MEV is introduced. Subjects include, but are not limited to, humans, plants, particularly crop plants, and animals, including farm animals and pets, such as dogs and cats, and zoo animals.

[0196] As used herein, a drug delivery system refers to a composition that contains MEVs provided herein that contain cargo for delivery to tissues. As shown herein, by virtue of the formulation and route of administration of the composition containing the MEVs the trafficking route and/or ultimate destination of the MEVs, upon administration, can selected. For example, as demonstrated herein, orally administered MEVs can target gut-associated lymphoid tissue (GALT). Thus, GALT is a target (effective compartment) and/or a route through which MEVs and their therapeutic agent cargo can be used to deliver cargo. The delivery system refers to the combining of formulation for a particular route of administration to target particular tissues for treatment of diseases, disorders, and conditions of these tissues or involving these tissues.

[0197] As used herein, disease or disorder or condition refers to a pathological or undesirable or undesired condition in an organism resulting from a cause or condition including, but not limited to, infections, acquired conditions, and genetic conditions, and those characterized by identifiable symptoms or characteristics.

[0198] As used herein, treating a subject with a disease, disorder, or condition means that the subject's symptoms or manifestations of the disease or conditions are partially or totally alleviated, or remain static following treatment.

[0199] As used herein, treatment refers to any effects that ameliorate symptoms of a disease or disorder. Treatment encompasses prophylaxis, therapy and/or cure.

[0200] Treatment also encompasses any pharmaceutical use of any MEV or composition provided herein. Treatment refers to any effects that ameliorate or prevent or otherwise reduce or eliminate any symptom or manifestation of a disease or disorder.

[0201] Treatment also encompasses any pharmaceutical use of any MEV or composition provided herein.

[0202] As used herein, prophylaxis refers to prevention of a potential disease and/or a prevention of worsening of symptoms or progression of a disease. Prevention or prophylaxis, and grammatically equivalent forms thereof, refer to methods in which the risk or probability of developing a disease or condition is reduced or eliminated and products that reduce or eliminate the risk or probability of developing a disease or condition.

[0203] As used herein, a modification with reference to modification of a sequence of amino acids of a polypeptide or a sequence of nucleotides in a nucleic acid molecule refers to and includes deletions, insertions, and replacements of amino acids or nucleotides, respectively. These include modifications of the primary sequence of a polypeptide or protein. Methods of modifying a polypeptide and nucleic acid molecule are routine to those of skill in the art, such as by using recombinant DNA methodologies. Modifications, when referring to polypeptide or protein, not to a sequence, refer to post-translational or post-purification changes, such as conjugation or linkage of moieties that alter properties of polypeptide or protein, such as half-life extending moieties, glycosylation, purification tags, detectable reporters, and other such moieties.

[0204] As used herein, a modification of a genome or a plasmid or gene includes deletions, replacements, insertions, and translocations of nucleic acid. These include any changes to the native or naturally-occurring nucleic acid sequence.

[0205] As used herein, RNA interference (RNAi) is a biological process in which RNA molecules inhibit gene expression or translation, by neutralizing targeted mRNA molecules to inhibit translation and thereby expression of a targeted gene.

[0206] As used herein, RNA molecules that act via RNAi are referred to as inhibitory by virtue of their silencing of expression of a targeted gene. Silencing expression means that expression of the targeted gene is reduced or suppressed or inhibited.

[0207] As used herein, gene silencing via RNAi is said to inhibit, suppress, disrupt or silence expression of a targeted gene. A targeted gene contains sequences of nucleotides that correspond to the sequences in the inhibitory RNA, whereby the inhibitory RNA silences expression of mRNA. Small interfering RNAs (siRNAs) are small pieces of double-stranded (ds) RNA, usually about 21 nucleotides long, with 3′ overhangs (2 nucleotides) at each end that can be used to interfere with the translation of proteins by binding to and promoting the degradation of messenger RNA (mRNA) at specific sequences. In doing so, siRNAs prevent the production of specific proteins based on the nucleotide sequences of their corresponding mRNAs. The process is called RNA interference (RNAi), and also is referred to as siRNA silencing or siRNA knockdown. A short-hairpin RNA or small-hairpin RNA (shRNA) is an artificial RNA molecule with a tight hairpin turn that can be used to silence target gene expression via RNA interference (RNAi). Expression of shRNA in cells is typically accomplished by delivery of plasmids or through viral or bacterial vectors.

[0208] As used herein, non-coding RNAs are RNAs that do not encode a protein. Classes of non-coding RNA, include, but are not limited to, small interfering RNAs (siRNAs) and microRNAs (miRNAs). As used herein, inhibiting, suppressing, disrupting or silencing a targeted gene refers to processes that alter expression, such as translation, of the targeted gene, whereby activity or expression of the product encoded by the targeted gene is reduced. Reduction includes a complete knock-out or a partial knockout, whereby, with reference to the MEVs provided herein and administration herein, treatment is effected.

[0209] As used herein, an adjuvant is a substance that enhances the body's immune response to an antigen; it can be formulated with a vaccine or be part of a vaccine. For purposes herein, an adjuvant does not refer to the MEVs or compositions containing the MEVs, but refers to an additional component to enhance the immune response. It is shown herein that the vaccines comprising the MEVs do not require an adjuvant; the immune response can be as robust with the MEVs as with an adjuvant containing the cargo. For purposes herein, the MEVs are not considered an adjuvant, but are the delivery vehicle. Co-administered active agents or other agents, such as toll-like receptor agonists or antagonists, while they can enhance an immune response, they are not considered adjuvants in the compositions as provided herein. For purposes herein, the reference to a composition comprising MEVs that does not comprise an adjuvant, is a composition to which an agent has not specifically been added to enhance the immune response to the MEV antigen cargo. It is understood that MEVs can include immunomodulatory compounds as cargo. Administration of the MEVs alone does not require an adjuvant. In some embodiments, a skilled person, however, may add an adjuvant.

[0210] As used herein, an exogenous adjuvant is a separate component of a vaccine composition, containing an MEV that comprises or encodes an antigen, and/or an immunomodulatory product or agent, that enhances the immune response to cargo in the MEV.

[0211] As used herein, a vaccine treats, results in an immune response, prevents, or reduces the severity of a disease, disorder, or condition. It stimulates an immune response against an antigen, which can be part of a pathogen, cell, such as a tumor cell, whereby the immune system can interact with the target to generally inactivate it or reduce the effect thereof. The immune response is thereby immunoprotective. Prevention includes prophylaxis by reducing the risk of getting or developing a disease, disorder, or condition, or reduces the severity of a disease, disorder, or condition.

[0212] As used herein, an immune modulator refers to an agent that stimulates or suppresses the immune system. Immune system modulators, include, for example, cytokines, including, but are not limited to, interferons, interleukins, ligands, receptors, and antibodies. Immune system modulators include those that act specifically on a particular target or targets, and those that act generally on the immune system. For purposes herein, the MEVs can deliver immune modulators, and in some embodiments, immune modulators in combination with antigens, to modulate the immune response to the antigen.

[0213] As used herein, a tumor microenvironment (TME) is the cellular environment in which the tumor exists, including surrounding blood vessels, immune cells, fibroblasts, bone marrow-derived inflammatory cells, lymphocytes, signaling molecules and the extracellular matrix (ECM). Conditions that exist include, but are not limited to, increased vascularization, hypoxia, low pH, increased lactate concentration, increased pyruvate concentration, increased interstitial fluid pressure and altered metabolites or metabolism, such as higher levels of adenosine, indicative of a tumor.

[0214] As used herein, recitation that a nucleic acid or encoded RNA targets a gene means that it inhibits or suppresses or silences expression of the gene by any mechanism. Generally, such nucleic acid includes at least a portion complementary to the targeted gene, where the portion is sufficient to form a hybrid with the complementary portion.

[0215] As used herein, deletion, when referring to a nucleic acid or polypeptide sequence, refers to the deletion of one or more nucleotides or amino acids compared to a sequence, such as a target polynucleotide or polypeptide or a native or wild-type sequence.

[0216] As used herein, insertion, when referring to a nucleic acid or amino acid sequence, describes the inclusion of one or more additional nucleotides or amino acids, within a target, native, wild-type or other related sequence. Thus, a nucleic acid molecule that contains one or more insertions compared to a wild-type sequence, contains one or more additional nucleotides within the linear length of the sequence.

[0217] As used herein, additions to nucleic acid and amino acid sequences describe addition of nucleotides or amino acids onto either termini compared to another sequence.

[0218] As used herein, substitution or replacement refers to the replacing of one or more nucleotides or amino acids in a native, target, wild-type or other nucleic acid or polypeptide sequence with an alternative nucleotide or amino acid, without changing the length (as described in numbers of residues) of the molecule. Thus, one or more substitutions in a molecule does not change the number of amino acid residues or nucleotides of the molecule. Amino acid replacements compared to a particular polypeptide can be expressed in terms of the number of the amino acid residues along the length of the polypeptide sequence.

[0219] As used herein, at a position corresponding to, or a recitation that nucleotides or amino acid positions correspond to nucleotides or amino acid positions in a disclosed sequence, such as set forth in the Sequence Listing, refers to nucleotides or amino acid positions identified upon alignment with the disclosed sequence to maximize identity using a standard alignment algorithm, such as the GAP algorithm. By aligning the sequences, one skilled in the art can identify corresponding residues, for example, using conserved and identical amino acid residues as guides. In general, to identify corresponding positions, the sequences of amino acids are aligned so that the highest order match is obtained (see, e.g., Computational Molecular Biology, Lesk, A. M., ed., Oxford University Press, New York, 1988; Biocomputing: Informatics and Genome Projects, Smith, D. W., ed., Academic Press, New York, 1993; Computer Analysis of Sequence Data, Part I, Griffin, A. M., and Griffin, H. G., eds., Humana Press, New Jersey, 1994; Sequence Analysis in Molecular Biology, von Heinje, G., Academic Press, 1987; Sequence Analysis Primer, Gribskov, M. and Devereux, J., eds., M Stockton Press, New York, 1991; and Carrillo et al. (1988) SIAM J Applied Math 48:1073).

[0220] As used herein, alignment of a sequence refers to the use of homology to align two or more sequences of nucleotides or amino acids. Typically, two or more sequences that are related by 50% or more identity are aligned. An aligned set of sequences refers to 2 or more sequences that are aligned at corresponding positions and can include aligning sequences derived from RNAs, such as ESTs and other cDNAs, aligned with genomic DNA sequence. Related or variant polypeptides or nucleic acid molecules can be aligned by any method known to those of skill in the art. Such methods typically maximize matches, and include methods, such as using manual alignments and by using the numerous alignment programs available (e.g., BLASTP) and others known to those of skill in the art. By aligning the sequences of polypeptides or nucleic acids, one skilled in the art can identify analogous portions or positions, using conserved and identical amino acid residues as guides. Further, one skilled in the art also can employ conserved amino acid or nucleotide residues as guides to find corresponding amino acid or nucleotide residues between and among human and non-human sequences. Corresponding positions also can be based on structural alignments, for example by using computer simulated alignments of protein structure. In other instances, corresponding regions can be identified. One skilled in the art also can employ conserved amino acid residues as guides to find corresponding amino acid residues between and among human and non-human sequences.

[0221] As used herein, a property of a polypeptide, such as an antibody, refers to any property exhibited by a polypeptide, including, but not limited to, binding specificity, structural configuration or conformation, protein stability, resistance to proteolysis, conformational stability, thermal tolerance, and tolerance to pH conditions. Changes in properties can alter an activity of the polypeptide. For example, a change in the binding specificity of the antibody polypeptide can alter the ability to bind an antigen, and/or various binding activities, such as affinity or avidity, or in vivo activities of the polypeptide.

[0222] As used herein, an activity or a functional activity of a polypeptide, such as an antibody, refers to any activity exhibited by the polypeptide. Such activities can be empirically determined. Exemplary activities include, but are not limited to, ability to interact with a biomolecule, for example, through antigen-binding, DNA binding, ligand binding, or dimerization, or enzymatic activity, for example, kinase activity or proteolytic activity. For an antibody (including antibody fragments), activities include, but are not limited to, the ability to specifically bind a particular antigen, affinity of antigen-binding (e.g., high or low affinity), avidity of antigen-binding (e.g., high or low avidity), on-rate, off-rate, effector functions, such as the ability to promote antigen neutralization or clearance, virus neutralization, and in vivo activities, such as the ability to prevent infection or invasion of a pathogen, or to promote clearance, or to penetrate a particular tissue or fluid or cell in the body. Activity can be assessed in vitro or in vivo using recognized assays, such as ELISA, flow cytometry, surface plasmon resonance or equivalent assays to measure on- or off-rate, immunohistochemistry and immunofluorescence histology and microscopy, cell-based assays, flow cytometry and binding assays (e.g., panning assays).

[0223] As used herein, bind, bound, and grammatical variations thereof refer to the participation of a molecule in any interaction with another molecule or among molecules, resulting in a stable association in which the molecules are in close proximity to one another. Binding includes, but is not limited to, non-covalent bonds, covalent bonds (such as reversible and irreversible covalent bonds), and includes interactions between molecules such as, but not limited to, proteins, nucleic acids, carbohydrates, lipids, and small molecules, such as chemical compounds including drugs.

[0224] As used herein, antibody refers to immunoglobulins and immunoglobulin fragments, whether natural or partially or wholly synthetically, such as recombinantly produced, including any fragment thereof containing at least a portion of the variable heavy chain and light region of the immunoglobulin molecule that is sufficient to form an antigen binding site and, when assembled, to specifically bind an antigen. Hence, an antibody includes any protein having a binding domain that is homologous or substantially homologous to an immunoglobulin antigen-binding domain (antibody combining site). For example, an antibody refers to an antibody that contains two heavy chains (which can be denoted H and H′) and two light chains (which can be denoted L and L′), where each heavy chain can be a full-length immunoglobulin heavy chain or a portion thereof sufficient to form an antigen binding site (e.g., heavy chains include, but are not limited to, VH chains, VH-CH1 chains and VH-CH1-CH2-CH3 chains), and each light chain can be a full-length light chain or a portion thereof sufficient to form an antigen binding site (e.g., light chains include, but are not limited to, VL chains and VL-CL chains). Each heavy chain (H and H′) pairs with one light chain (L and L′, respectively). Typically, antibodies minimally include all or at least a portion of the variable heavy (VH) chain and/or the variable light (VL) chain. The antibody also can include all or a portion of the constant region.

[0225] For purposes herein, the term antibody includes full-length antibodies and portions thereof including antibody fragments, such as anti-tumor antibody or anti-pathogen or gene silencing fragments. Antibody fragments, include, but are not limited to, Fab fragments, Fab′ fragments, F(ab′)₂ fragments, Fv fragments, disulfide-linked Fvs (dsFv), Fd fragments, Fd′ fragments, single-chain Fvs (scFv), single-chain Fabs (scFab), diabodies, anti-idiotypic (anti-Id) antibodies, or antigen-binding fragments of any of the above. Antibody also includes synthetic antibodies, recombinantly produced antibodies, multispecific antibodies (e.g., bispecific antibodies), human antibodies, non-human antibodies, humanized antibodies, chimeric antibodies, and intrabodies. Antibodies can include members of any immunoglobulin class (e.g., IgG, IgM, IgD, IgE, IgA and IgY), any subclass (e.g., IgG1, IgG2, IgG3, IgG4, IgAQ1 and IgA2) or sub-subclass (e.g., IgG2a and IgG2b).

[0226] As used herein, nucleic acid refers to at least two linked nucleotides or nucleotide derivatives, including a deoxyribonucleic acid (DNA) and a ribonucleic acid (RNA), joined together, typically by phosphodiester linkages. Also included in the term nucleic acid are analogs of nucleic acids such as peptide nucleic acid (PNA), phosphorothioate DNA, and other such analogs and derivatives or combinations thereof. Nucleic acids also include DNA and RNA derivatives containing, for example, a nucleotide analog or a backbone bond other than a phosphodiester bond, for example, a phosphotriester bond, a phosphoramidate bond, a phosphorothioate bond, a thioester bond, or a peptide bond (peptide nucleic acid). The term also includes, as equivalents, derivatives, variants, and analogs of either RNA or DNA made from nucleotide analogs, single (sense or antisense) and double-stranded nucleic acids. Deoxyribonucleotides include deoxyadenosine, deoxycytidine, deoxyguanosine and deoxythymidine. For RNA, the uracil base is uridine.

[0227] As used herein, an isolated nucleic acid molecule is one which is separated from other nucleic acid molecules which are present in the natural source of the nucleic acid molecule. An isolated nucleic acid molecule, such as a cDNA molecule, can be substantially free of other cellular material, or culture medium when produced by recombinant techniques, or substantially free of chemical precursors or other chemicals when chemically synthesized. Exemplary isolated nucleic acid molecules provided herein include isolated nucleic acid molecules encoding RNAi or a therapeutic protein.

[0228] As used herein, operably linked with reference to nucleic acid sequences, regions, elements or domains means that the nucleic acid regions are functionally related to each other. For example, a nucleic acid encoding a leader peptide can be operably linked to a nucleic acid encoding a polypeptide, whereby the nucleic acids can be transcribed and translated to express a functional fusion protein, wherein the leader peptide effects secretion of the fusion polypeptide. In some instances, the nucleic acid encoding a first polypeptide (e.g., a leader peptide) is operably linked to a nucleic acid encoding a second polypeptide and the nucleic acids are transcribed as a single mRNA transcript, but translation of the mRNA transcript can result in one of two polypeptides being expressed. For example, an amber stop codon can be located between the nucleic acid encoding the first polypeptide and the nucleic acid encoding the second polypeptide, such that, when introduced into a partial amber suppressor cell, the resulting single mRNA transcript can be translated to produce either a fusion protein containing the first and second polypeptides, or can be translated to produce only the first polypeptide. In another example, a promoter can be operably linked to nucleic acid encoding a polypeptide, whereby the promoter regulates or mediates the transcription of the nucleic acid.

[0229] As used herein, synthetic, with reference to, for example, a synthetic nucleic acid molecule or a synthetic gene or a synthetic peptide refers to a nucleic acid molecule or polypeptide molecule that is produced by recombinant methods and/or by chemical synthesis methods.

[0230] As used herein, the residues of naturally occurring α-amino acids are the residues of those 20 α-amino acids found in nature which are incorporated into protein by the specific recognition of the charged tRNA molecule with its cognate mRNA codon in humans.

[0231] As used herein, polypeptide refers to two or more amino acids covalently joined. The terms polypeptide and protein are used interchangeably herein.

[0232] As used herein, a peptide refers to a polypeptide that is from 2 to about or 40 amino acids in length.

[0233] As used herein, reference to proteins, unless otherwise specified, includes all forms of peptides, polypeptides, small peptides, and proteins.

[0234] As used herein, an amino acid is an organic compound containing an amino group and a carboxylic acid group. A polypeptide contains two or more amino acids. For purposes herein, amino acids contained in the antibodies provided include the twenty naturally-occurring amino acids (see Table below), non-natural amino acids, and amino acid analogs (e.g., amino acids wherein the α-carbon has a side chain). As used herein, the amino acids, which occur in the various amino acid sequences of polypeptides appearing herein, are identified according to their well-known, three-letter or one-letter abbreviations (see Table below). The nucleotides, which occur in the various nucleic acid molecules and fragments, are designated with the standard single-letter designations used routinely in the art.

[0235] As used herein, amino acid residue refers to an amino acid formed upon chemical digestion (hydrolysis) of a polypeptide at its peptide linkages. The amino acid residues described herein are generally in the L isomeric form. Residues in the D isomeric form can be substituted for any L-amino acid residue, as long as the desired functional property is retained by the polypeptide. NH₂ refers to the free amino group present at the amino terminus of a polypeptide. COOH refers to the free carboxy group present at the carboxyl terminus of a polypeptide. In keeping with standard polypeptide nomenclature described in J. Biol. Chem., 243:3557-59 (1968) and adopted at 37 C.F.R. §§ 1.821-1.822, abbreviations for amino acid residues are shown in the following Table:

Table of Correspondence

SYMBOL

| 1-Letter | 3-Letter | AMINO ACID |
|---|---|---|
| Y | Tyr | Tyrosine |
| G | Gly | Glycine |
| F | Phe | Phenylalanine |
| M | Met | Methionine |
| A | Ala | Alanine |
| S | Ser | Serine |
| I | Ile | Isoleucine |
| L | Leu | Leucine |
| T | Thr | Threonine |
| V | Val | Valine |
| P | Pro | Proline |
| K | Lys | Lysine |
| H | His | Histidine |
| Q | Gln | Glutamine |
| E | Glu | Glutamic acid |
| Z | Glx | Glutamic Acid and/or Glutamine |
| W | Trp | Tryptophan |
| R | Arg | Arginine |
| D | Asp | Aspartic acid |
| N | Asn | Asparagine |
| B | Asx | Aspartic Acid and/or Asparagine |
| C | Cys | Cysteine |
| X | Xaa | Unknown or other |

[0236] All sequences of amino acid residues represented herein by a formula have a left to right orientation in the conventional direction of amino-terminus to carboxyl-terminus. The phrase “amino acid residue” is defined to include the amino acids listed in the above Table of Correspondence, modified, non-natural and unusual amino acids. A dash at the beginning or end of an amino acid residue sequence indicates a peptide bond to a further sequence of one or more amino acid residues or to an amino-terminal group such as NH₂ or to a carboxyl-terminal group such as COOH.

[0237] In a peptide or protein, suitable conservative substitutions of amino acids are known to those of skill in the art and generally can be made without altering a biological activity of a resulting molecule. Those of skill in the art recognize that, in general, single amino acid substitutions in non-essential regions of a polypeptide do not substantially alter biological activity (see, e.g., Watson et al., Molecular Biology of the Gene, 4th Edition, 1987, The Benjamin/Cummings Pub. Co., p. 224).

[0238] Such substitutions can be made in accordance with the exemplary substitutions set forth in the following Table:

Exemplary conservative amino acid substitutions

| Original | Exemplary Conservative |
|---|---|
| residue | substitution(s) |
| Ala (A) | Gly; Ser |
| Arg (R) | Lys |
| Asn (N) | Gln; His |
| Cys (C) | Ser |
| Gln (Q) | Asn |
| Glu (E) | Asp |
| Gly (G) | Ala; Pro |
| His (H) | Asn; Gln |
| Ile (I) | Leu; Val |
| Leu (L) | Ile; Val |
| Lys (K) | Arg; Gln; Glu |
| Met (M) | Leu; Tyr; Ile |
| Phe (F) | Met; Leu; Tyr |
| Ser (S) | Thr |
| Thr (T) | Ser |
| Trp (W) | Tyr |
| Tyr (Y) | Trp; Phe |
| Val (V) | Ile; Leu |

[0239] Other substitutions also are permissible and can be determined empirically or in accord with other known conservative or non-conservative substitutions.

[0240] As used herein, naturally occurring amino acids refer to the 20 L-amino acids that occur in polypeptides.

[0241] As used herein, the term non-natural amino acid refers to an organic compound that has a structure similar to a natural amino acid but has been modified structurally to mimic the structure and reactivity of a natural amino acid. Non-naturally occurring amino acids thus include, for example, amino acids or analogs of amino acids other than the 20 naturally occurring amino acids and include, but are not limited to, the D-stereoisomers of amino acids. Exemplary non-natural amino acids are known to those of skill in the art, and include, but are not limited to, 2-Aminoadipic acid (Aad), 3-Aminoadipic acid (bAad), β-alanine/β-Amino-propionic acid (Bala), 2-Aminobutyric acid (Abu), 4-Aminobutyric acid/piperidinic acid (4Abu), 6-Aminocaproic acid (Acp), 2-Aminoheptanoic acid (Ahe), 2-Aminoisobutyric acid (Aib), 3-Aminoisobutyric acid (Baib), 2-Aminopimelic acid (Apm), 2,4-Diaminobutyric acid (Dbu), Desmosine (Des), 2,2′-Diaminopimelic acid (Dpm), 2,3-Diaminopropionic acid (Dpr), N-Ethylglycine (EtGly), N-Ethylasparagine (EtAsn), Hydroxylysine (Hyl), allo-Hydroxylysine (Ahyl), 3-Hydroxyproline (3Hyp), 4-Hydroxyproline (4Hyp), Isodesmosine (Ide), allo-Isoleucine (Aile), N-Methylglycine, sarcosine (MeGly), N-Methylisoleucine (MeIle), 6-N-Methyllysine (MeLys), N-Methylvaline (MeVal), Norvaline (Nva), Norleucine (Nle), and Ornithine (Orn).

[0242] As used herein, a DNA construct is a single- or double-stranded, linear or circular DNA molecule that contain segments of DNA combined and juxtaposed in a manner not found in nature. DNA constructs exist as a result of human manipulation, and include clones and other copies of manipulated molecules.

[0243] As used herein, a DNA segment is a portion of a larger DNA molecule having specified attributes. For example, a DNA segment encoding a specified polypeptide is a portion of a longer DNA molecule, such as a plasmid or plasmid fragment, which, when read from the 5′ to 3′ direction, encodes the sequence of amino acids of the specified polypeptide.

[0244] As used herein, the term polynucleotide means a single- or double-stranded polymer of deoxyribonucleotides or ribonucleotide bases read from the 5′ to the 3′ end. Polynucleotides include RNA and DNA, and can be isolated from natural sources, synthesized in vitro, or prepared from a combination of natural and synthetic molecules. The length of a polynucleotide molecule is given herein in terms of nucleotides (abbreviated nt) or base pairs (abbreviated bp). The term “nucleotides” is used for single- and double-stranded molecules where the context permits. When the term is applied to double-stranded molecules it is used to denote overall length and will be understood to be equivalent to the term base pairs. It will be recognized by those skilled in the art that the two strands of a double-stranded polynucleotide can differ slightly in length and that the ends thereof can be staggered; thus, all nucleotides within a double-stranded polynucleotide molecule cannot be paired. Such unpaired ends will, in general, not exceed 20 nucleotides in length.

[0245] As used herein, production by recombinant methods refers to or means the use of the well-known methods of molecular biology for expressing proteins encoded by cloned DNA.

[0246] As used herein, heterologous nucleic acid is nucleic acid that encodes products (i.e., RNA and/or proteins) that are not normally produced in vivo by the cell in which it is expressed, or nucleic acid that is in a locus in which it does not normally occur, or that mediates or encodes mediators that alter expression of endogenous nucleic acid, such as DNA, by affecting transcription, translation, or other regulatable biochemical processes. Heterologous nucleic acid, such as DNA, also is referred to as foreign nucleic acid. Any nucleic acid, such as DNA, that one of skill in the art would recognize or consider as heterologous or foreign to the cell in which it is expressed, is herein encompassed by heterologous nucleic acid; heterologous nucleic acid includes exogenously added nucleic acid that is also expressed endogenously. Heterologous nucleic acid is generally not endogenous to the cell into which it is introduced, but has been obtained from another cell or prepared synthetically or is introduced into a genomic locus in which it does not occur naturally, or its expression is under the control of regulatory sequences or a sequence that differs from the natural regulatory sequence or sequences.

[0247] Examples of heterologous nucleic acid herein include, but are not limited to, a DNA molecule, an RNA molecule, a plasmid, and an antisense oligonucleotide. In the MEV, the heterologous nucleic acid can be encoded on a plasmid. Heterologous nucleic acid, such as DNA, includes nucleic acid that can, in some manner, mediate expression of DNA that encodes a therapeutic product, or it can encode a product, such as a peptide or RNA, that in some manner mediates, directly or indirectly, expression of a therapeutic product.

[0248] As used herein, cell therapy involves the delivery of MEVs to a subject to treat a disease or condition. The MEVs are exogenously loaded with cargo, so that they deliver or express products when introduced to a subject. The MEVs also can be endogenously loaded with cargo (see, e.g., copending U.S. provisional application Ser. No. 63/349,006, filed on Jun. 3, 2022, which details preparation of endogenously-loaded MEVs and producer cell lines thereof), and used as described herein. The trafficking of MEVs generally is independent of manner in which they are loaded with cargo. The microalgae can be modified to alter properties of the resulting MEVs. Endogenously-loaded MEVs can be used in the methods and compositions described herein.

[0249] As used herein, genetic therapy involves the transfer of heterologous nucleic acid, such as DNA, into certain cells, such as target cells, of a mammal, particularly a human, with a disorder or condition for which such therapy is sought. The nucleic acid, such as DNA, is introduced into the selected target cells in a manner such that the heterologous nucleic acid, such as DNA, is expressed and a therapeutic product(s) encoded thereby is produced. Genetic therapy can also be used to deliver nucleic acid encoding a gene product that replaces a defective gene or supplements a gene product produced by the mammal or the cell in which it is introduced. The introduced nucleic acid can encode a therapeutic compound, such as a growth factor or inhibitor thereof, or a tumor necrosis factor or inhibitor thereof, such as a receptor thereof, that is not normally produced in the mammalian host or that is not produced in therapeutically effective amounts or at a therapeutically useful time. The heterologous nucleic acid, such as DNA, encoding the therapeutic product, can be modified prior to introduction into the cells of the afflicted host in order to enhance or otherwise alter the product or expression thereof. Genetic therapy can also involve delivery of an inhibitor or repressor or other modulator of gene expression.

[0250] As used herein, expression refers to the process by which polypeptides are produced by transcription and translation of polynucleotides. The level of expression of a polypeptide can be assessed using any method known in art, including, for example, methods of determining the amount of the polypeptide produced from the host cell. Such methods can include, but are not limited to, quantitation of the polypeptide in the cell lysate by ELISA, Coomassie blue staining following gel electrophoresis, Lowry protein assay and Bradford protein assay.

[0251] As used herein, a host cell is a cell that is used to receive, maintain, reproduce and/or amplify a vector. A host cell also can be used to express the polypeptide encoded by the vector. The nucleic acid contained in the vector is replicated when the host cell divides, thereby amplifying the nucleic acids.

[0252] As used herein, a vector is a replicable nucleic acid from which one or more heterologous proteins can be expressed when the vector is transformed into an appropriate host cell. Reference to a vector includes those vectors into which a nucleic acid encoding a polypeptide or fragment thereof can be introduced, typically by restriction enzyme digestion and ligation. Reference to a vector also includes those vectors that contain nucleic acid encoding a polypeptide or RNA. The vector is used to introduce the nucleic acid encoding the polypeptide into the host cell for amplification of the nucleic acid or for expression/display of the polypeptide encoded by the nucleic acid. The vectors typically remain episomal, but can be designed to effect integration of a gene or portion thereof into a chromosome of the genome. Also contemplated are vectors that are artificial chromosomes, such as yeast artificial chromosomes and mammalian artificial chromosomes. Selection and use of such vehicles are well-known to those of skill in the art. A vector also includes virus vectors or viral vectors. Viral vectors are engineered viruses that are operatively linked to exogenous genes to transfer (as vehicles or shuttles) the exogenous genes into cells.

[0253] As used herein, an expression vector includes vectors capable of expressing DNA that is operatively linked with regulatory sequences, such as promoter regions, that are capable of effecting expression of such DNA fragments. Such additional segments can include promoter and terminator sequences, and optionally can include one or more origins of replication, one or more selectable markers, an enhancer, a polyadenylation signal, and the like. Expression vectors are generally derived from plasmid or viral DNA, or can contain elements of both. Thus, an expression vector refers to a recombinant DNA or RNA construct, such as a plasmid, a phage, recombinant virus or other vector that, upon introduction into an appropriate host cell, results in expression of the cloned DNA. Appropriate expression vectors are well-known to those of skill in the art and include those that are replicable in eukaryotic cells and/or prokaryotic cells and those that remain episomal or those which integrate into the host cell genome.

[0254] As used herein, primary sequence refers to the sequence of amino acid residues in a polypeptide or the sequence of nucleotides in a nucleic acid molecule.

[0255] As used herein, sequence identity refers to the number of identical or similar amino acids or nucleotide bases in a comparison between a test and a reference poly-peptide or polynucleotide. Sequence identity can be determined by sequence alignment of nucleic acid or protein sequences to identify regions of similarity or identity. For purposes herein, sequence identity is generally determined by alignment to identify identical residues. The alignment can be local or global. Matches, mismatches and gaps can be identified between compared sequences. Gaps are null amino acids or nucleotides inserted between the residues of aligned sequences so that identical or similar characters are aligned. Generally, there can be internal and terminal gaps. When using gap penalties, sequence identity can be determined with no penalty for end gaps (e.g., terminal gaps are not penalized). Alternatively, sequence identity can be determined without taking into account gaps as the number of identical positions/length of the total aligned sequence×100.

[0256] As used herein, a global alignment is an alignment that aligns two sequences from beginning to end, aligning each letter in each sequence only once. An alignment is produced, regardless of whether or not there is similarity or identity between the sequences. For example, 50% sequence identity based on global alignment means that in an alignment of the full sequence of two compared sequences each of 100 nucleotides in length, 50% of the residues are the same. It is understood that global alignment also can be used in determining sequence identity even when the length of the aligned sequences is not the same. The differences in the terminal ends of the sequences will be taken into account in determining sequence identity, unless the no penalty for end gaps is selected. Generally, a global alignment is used on sequences that share significant similarity over most of their length. Exemplary algorithms for performing global alignment include the Needleman-Wunsch algorithm (Needleman et al. (1970) J. Mol. Biol. 48: 443). Exemplary programs for performing global alignment are publicly available and include the Global Sequence Alignment Tool available at the National Center for Biotechnology Information (NCBI) website (ncbi.nlm.nih.gov/), and the program available at deepc2.psi.iastate.edu/aat/align/align.html.

[0257] As used herein, a local alignment is an alignment that aligns two sequences, but only aligns those portions of the sequences that share similarity or identity. Hence, a local alignment determines if sub-segments of one sequence are present in another sequence. If there is no similarity, no alignment will be returned. Local alignment algorithms include BLAST or Smith-Waterman algorithm (Adv. Appl. Math. 2: 482 (1981)). For example, 50% sequence identity based on local alignment means that in an alignment of the full sequence of two compared sequences of any length, a region of similarity or identity of 100 nucleotides in length has 50% of the residues that are the same in the region of similarity or identity.

[0258] For purposes herein, sequence identity can be determined by standard alignment algorithm programs used with default gap penalties established by each supplier. Default parameters for the GAP program can include: (1) a unary comparison matrix (containing a value of 1 for identities and 0 for non-identities) and the weighted comparison matrix of Gribskov et al. (1986) Nucl. Acids Res. 14:6745, as described by Schwartz and Dayhoff, eds., Atlas of Protein Sequence and Structure, National Biomedical Research Foundation, pp. 353-358 (1979); (2) a penalty of 3.0 for each gap and an additional 0.10 penalty for each symbol in each gap; and (3) no penalty for end gaps. Whether any two nucleic acid molecules have nucleotide sequences or any two polypeptides have amino acid sequences that are at least 80%, 85%, 90%, 95%, 96%, 97%, 98% or 99% identical, or other similar variations reciting a percent identity, can be determined using known computer algorithms based on local or global alignment (see e.g., wikipedia.org/wiki/Sequence_alignment_software, providing links to dozens of known and publicly available alignment databases and programs). Generally, for purposes herein sequence identity is determined using computer algorithms based on global alignment, such as the Needleman-Wunsch Global Sequence Alignment tool available from NCBI/BLAST (blast.ncbi.nlm.nih.gov/Blast.cgi?CMD=Web&Page_TYPE=BlastHome); LAlign (William Pearson implementing the Huang and Miller algorithm (Adv. Appl. Math. (1991) 12:337-357)); and program from Xiaoqui Huang available at deepc2.psi.iastate.edu/aat/align/align.html. Typically, the full-length sequence of each of the compared polypeptides or nucleotides is aligned across the full-length of each sequence in a global alignment. Local alignment also can be used when the sequences being compared are substantially the same length.

[0259] Therefore, as used herein, the term identity represents a comparison or alignment between a test and a reference polypeptide or polynucleotide. In one non-limiting example, at least 90% identical to refers to percent identities from 90 to 100% relative to the reference polypeptide or polynucleotide. Identity at a level of 90% or more is indicative of the fact that, assuming for exemplification purposes a test and reference polypeptide or polynucleotide length of 100 amino acids or nucleotides are compared, no more than 10% (i.e., 10 out of 100) of amino acids or nucleotides in the test polypeptide or polynucleotide differ from those of the reference polypeptide. Similar comparisons can be made between a test and reference polynucleotides. Such differences can be represented as point mutations randomly distributed over the entire length of an amino acid sequence or they can be clustered in one or more locations of varying length up to the maximum allowable, e.g., 10/100 amino acid difference (approximately 90% identity). Differences also can be due to deletions or truncations of amino acid residues. Differences are defined as nucleic acid or amino acid substitutions, insertions or deletions. Depending on the length of the compared sequences, at the level of homologies or identities above about 85-90%, the result can be independent of the program and gap parameters set; such high levels of identity can be assessed readily, often without relying on software.

[0260] As used herein, a pharmaceutically effective agent includes any therapeutic agent or bioactive agents, including, but not limited to, for example, anesthetics, vasoconstrictors, dispersing agents, and conventional therapeutic drugs, including small molecule drugs and therapeutic proteins.

[0261] As used herein, a therapeutic effect means an effect resulting from treatment of a subject that alters, typically improves or ameliorates, the symptoms of a disease or condition or that cures a disease or condition.

[0262] As used herein, a therapeutically effective amount or a therapeutically effective dose refers to the quantity of an agent, compound, material, or composition containing a compound that is at least sufficient to produce a therapeutic effect following administration to a subject. Hence, it is the quantity necessary for preventing, curing, ameliorating, arresting or partially arresting a symptom of a disease or disorder.

[0263] As used herein, therapeutic efficacy refers to the ability of an agent, compound, material, or composition containing a compound to produce a therapeutic effect in a subject to whom the agent, compound, material, or composition containing a compound has been administered.

[0264] As used herein, a prophylactically effective amount or a prophylactically effective dose refers to the quantity of an agent, compound, material, or composition containing a compound that when administered to a subject, will have the intended prophylactic effect, e.g., preventing or delaying the onset, or reoccurrence, of disease or symptoms, reducing the likelihood of the onset, or reoccurrence, of disease or symptoms, or reducing the incidence of viral infection. The full prophylactic effect does not necessarily occur by administration of one dose, and can occur only after administration of a series of doses. Thus, a prophylactically effective amount can be administered in one or more administrations.

[0265] As used herein, amelioration of the symptoms of a particular disease or disorder by a treatment, such as by administration of a pharmaceutical composition or other therapeutic, refers to any lessening, whether permanent or temporary, lasting or transient, of the symptoms that can be attributed to or associated with administration of the composition or therapeutic.

[0266] As used herein, an anti-cancer agent refers to any agent that is destructive or toxic to malignant cells and tissues. For example, anti-cancer agents include agents that kill cancer cells or otherwise inhibit or impair the growth of tumors or cancer cells. Exemplary anti-cancer agents are chemotherapeutic agents.

[0267] As used herein therapeutic activity refers to the in vivo activity of a therapeutic polypeptide. Generally, the therapeutic activity is the activity that is associated with treatment of a disease or condition.

[0268] As used herein, the term subject refers to an animal, including a mammal, such as a human being.

[0269] As used herein, a patient refers to a human subject.

[0270] As used herein, animal includes any animal, such as, but not limited to, primates including humans, gorillas and monkeys; rodents, such as mice and rats; fowl, such as chickens; ruminants, such as goats, cows, deer, and sheep; and pigs and other animals. Non-human animals exclude humans as the contemplated animal.

[0271] As used herein, a composition refers to any mixture. It can be a solution, suspension, liquid, powder, paste, aqueous, non-aqueous, or any combination thereof.

[0272] As used herein, a combination refers to any association between or among two or more items. The combination can be two or more separate items, such as two compositions or two collections, a mixture thereof, such as a single mixture of the two or more items, or any variation thereof. The elements of a combination are generally functionally associated or related.

[0273] As used herein, combination therapy refers to administration of two or more different therapeutics. The different therapeutic agents can be provided and administered separately, sequentially, intermittently, or can be provided in a single composition.

[0274] As used herein, a kit is a packaged combination that optionally includes other elements, such as additional reagents and instructions for use of the combination or elements thereof, for a purpose including, but not limited to, activation, administration, diagnosis, and assessment of a biological activity or property.

[0275] As used herein, a unit dose form refers to physically discrete units suitable for human and animal subjects and packaged individually as is known in the art.

[0276] As used herein, a single dosage formulation refers to a formulation for direct administration.

[0277] As used herein, a multi-dose formulation refers to a formulation that contains multiple doses of a therapeutic agent and that can be directly administered to provide several single doses of the therapeutic agent. The doses can be administered over the course of minutes, hours, weeks, days or months. Multi-dose formulations can allow dose adjustment, dose-pooling and/or dose-splitting. Because multi-dose formulations are used over time, they generally contain one or more preservatives to prevent microbial growth.

[0278] As used herein, an article of manufacture is a product that is made and sold. As used throughout this application, the term is intended to encompass any of the compositions provided herein contained in articles of packaging.

[0279] As used herein, a fluid refers to any composition that can flow. Fluids thus encompass compositions that are in the form of semi-solids, pastes, solutions, aqueous mixtures, gels, lotions, creams, and other such compositions.

[0280] As used herein, an isolated or purified polypeptide or protein (e.g., an isolated antibody or antigen-binding fragment thereof) or biologically-active portion thereof (e.g., an isolated antigen-binding fragment) is substantially free of cellular material or other contaminating proteins from the cell or tissue from which the protein is derived, or substantially free from chemical precursors or other chemicals when chemically synthesized. Preparations can be determined to be substantially free if they appear free of readily detectable impurities as determined by standard methods of analysis, such as thin layer chromatography (TLC), gel electrophoresis and high performance liquid chromatography (HPLC), used by those of skill in the art to assess such purity, or sufficiently pure such that further purification does not detectably alter the physical and chemical properties, such as enzymatic and biological activities, of the substance. Methods for purification of the compounds to produce substantially chemically pure compounds are known to those of skill in the art. A substantially chemically pure compound, however, can be a mixture of stereoisomers. In such instances, further purification might increase the specific activity of the compound.

[0281] As used herein, a cellular extract or lysate refers to a preparation or fraction which is made from a lysed or disrupted cell.

[0282] As used herein, a control refers to a sample that is substantially identical to the test sample, except that it is not treated with a test parameter, or, if it is a plasma sample, it can be from a normal volunteer not affected with the condition of interest.

[0283] A control also can be an internal control.

[0284] As used herein, a tropism of an MEV refers to cells, tissues, and/or organs wherein the MEVs, upon administration, accumulate.

[0285] As used herein, natural tropism with reference to the MEVS provided herein, refers to MEVs that are not modified to provide a specific tropism or targeting property.

[0286] As used herein, the singular forms “a,” “an” and “the” include plural referents unless the context clearly dictates otherwise. Thus, for example, reference to a polypeptide, comprising an immunoglobulin domain includes polypeptides with one or a plurality of immunoglobulin domains.

[0287] As used herein, the term “or” is used to mean “and/or” unless explicitly indicated to refer to alternatives only or the alternatives are mutually exclusive.

[0288] As used herein, ranges and amounts can be expressed as about a particular value or range. “About” also includes the exact amount. Hence about 5 amino acids means about 5 amino acids and also 5 amino acids.

[0289] As used herein, “optional” or “optionally” means that the subsequently described event or circumstance does or does not occur and that the description includes instances where said event or circumstance occurs and instances where it does not. For example, an optionally variant portion means that the portion is variant or non-variant.

[0290] As used herein, the abbreviations for any protective groups, amino acids and other compounds, are, unless indicated otherwise, in accord with their common usage, recognized abbreviations, or the IUPAC-IUB Commission on Biochemical Nomenclature (see, Biochem. (1972) 11(9):1726-1732).

[0291] For clarity of disclosure, and not by way of limitation, the detailed description is divided into the subsections that follow.

### B. MICROALGAE AND OVERVIEW

[0292] Algae are a complex, polyphyletic collection of predominantly photosynthetic organisms. These organisms include micro- and macroscopic forms. Macroalgae (seaweed) are multicellular, large-size algae, visible with the naked eye. Microalgae are microscopic single cells and include prokaryotes (e.g., cyanobacteria), and eukaryotes, such as green algae.

[0293] Compared to photosynthetic crops, microalgae have a higher growth rate and can be cultivated on non-arable land, and also in bioreactors. Many species of microalgae can be grown year-round in industrial scale photobioreactors under controlled cultivation conditions (Adamo et al. (2021) Journal of Extracellular Vesicles 10:e12081).

[0294] Algae generally are classified into eleven major phyla: Cyanophyta, Chlorophyta, Rhodophyta, Glaucophyta, Euglenophyta, Chlorarachniophyta, Charophyta, Cryptophyta, Haptophyta, Heterokontophyta, and Dinophyta (Barkia et al. (2019) Mar. Drugs 17(5):304). Different pigments occur in each algae group. Cyanobacteria (or Cyanophyta) contain chlorophyll-a, -d, and -f, in addition to the phycobiliproteins (proteins that capture light energy), phycocyanin, allophycocyanin, and phycoerythrin. Glaucophytes contain chlorophyll-a and harvest light via phycobiliproteins. Chlorophytes have chlorophyll-a and -b, as well as carotenoids, including β-carotene and various xanthophylls (e.g., astaxanthin, canthaxanthin, lutein, and zeaxanthin). The primary pigments of Rhodophyta (red algae) are phycoerythrin and phycocyanin, which can mask chlorophyll-a; red algae also produce a broad spectrum of carotenes and xanthophyll light-harvesting pigments (Barkia et al. (2019) Mar. Drugs 17(5):304).

[0295] Extracellular vesicles produced by algae, particularly unicellular green algae, such as species of Chlorella, for use for delivery of exogenously loaded cargo to animals and plants for use as vaccines and for delivery of immunomodulators are provided. The algae are unicellular eukaryotes that typically are haploid, but can have a diploid stage of the life cycle. The algae can be cultured in bioreactors and the extracellular vesicles isolated therefrom. The resulting extracellular vesicles can be loaded by methods such as electroporation, with cargo, generally a cargo of heterologous bioactive molecules to produce compositions that contain the extracellular vesicles for administration to animals and also to plants. The compositions can be formulated for any desired route of administration, including topical, local, systemic, parenteral, and oral. These routes include oral, intravenous, subcutaneous, inhalation, mucosal, rectal, vaginal, and other suitable routes. The cargo includes biomolecules, such as DNA, RNA, proteins, protein complexes, protein-nucleic acid complexes, plasmids, and also includes small molecules, such as small molecule drugs. The extracellular vesicles can be formulated as liquids, powders, including lyophilized powders, tablets, capsules, emulsions, particles, sprays, gels, ointments, creams, and other formulations. They can be used for therapeutic, diagnostic, theragnostic, cosmetic, and other uses. The extracellular vesicles can be used to treat diseases and conditions, that include cancers, inflammatory diseases and conditions in which the immune system plays a role in the etiology or symptoms, nervous system disorders, and pathogen infections, including viral and bacterial and other pathogens. They can be used to treat dermatological diseases and conditions, lung diseases and conditions, and gastric diseases and conditions. The extracellular vesicles can be targeted to specific organs or tissues or can be locally administered.

[0296] As with extracellular vesicles (EVs) from other sources, such as mammalian EVs, microalgae EVs (MEVs) have evolved to efficiently pass genetic material and other kinds of molecules from cell to cell. They orchestrate intercellular and cross-kingdom communication between cells via exchange of biologically active molecules. MEVs are natural nanoparticles. They are cell-derived, so, absent synthetic cargo, and genetic modifications, there are no synthetic components; they are safe, for example, there is no risk of endogenous viruses that are potentially dangerous to humans.

[0297] The MEVs provided herein include, but are not limited to, Chlorella MEVs, particularly Chlorella vulgaris, a freshwater microalgae. Chlorella is a unicellular haploid alga that is a natural and efficient producer of extracellular vesicles. Chlorella vulgaris has been consumed worldwide as a food supplement for decades; it is non-toxic and non-immunogenic, and can be cultured at large industrial scale at low cost.

[0298] The MEVs provided herein can be directly used to protect, convey, and deliver a broad spectrum of innovative therapeutic molecules into target cells relevant to specific diseases. Chlorella MEVs are exemplary of MEVs; their properties and results are exemplary of MEVs from other microalgae. For example, it is shown herein that the MEVs are not immunogenic; hence can be administered multiple times without adverse effects; they do alter or impair the immune response or immunomodulatory effects of the delivered cargo.

[0299] As shown and described herein, the MEVs have a number of advantageous features including, for example, biodistribution patterns by route of administration, low toxicity, good pharmacokinetic profiles in vivo. They can be administered by a variety of routes including oral administration, administration to the respiratory tract, intranasally, intravenously, among other routes. They traffic to specific organs, according to the route of administration, such as the intestine, the GALT, the spleen, the lungs, the liver, and mucosa. Based on data herein and comparison with data for other EVs and drug delivery systems, the MEVs have longer clearance rates and last longer in the targeted organs, tissues, and cells than reported for other delivery systems, including mammalian EVs.

[0300] As shown herein, the MEVs overcome natural body barriers (such as oral delivery, or specific lymphoid tissues delivery, or nose-to-brain delivery) that have not been attained with liquid nanoparticles and EVs of mammalian origin. Hence, the MEVs for use as vaccines and to deliver immunomodulatory products to spleen and other organs of the immune system can be administered orally, as well as by other routes, such as IM. The MEVs provided herein address unmet needs. These include the ability to convey and reliably deliver therapeutic molecules specifically to the site of treatment, while avoiding premature degradation or inactivation of the therapeutic agent by the immune system or by enzymes; for treatment of diseases for which a therapeutic agent already exists but cannot be properly delivered.

[0301] As shown herein, the purified or partially-purified MEVs can be loaded by physical methods (exogenous loading; exo-loading). Exo-loading is scalable and industrializable. The MEVs can be exo-loaded with a variety of molecules, varying in size, hydrophobicity, and nature, such as siRNA, mRNA, peptides, proteins, plasmids, oligonucleotides, and small molecules. The biological activity of the exo-loaded cargo is preserved, while at the same time it is protected from degradation by enzymes and other agents present in vivo. The MEVs can deliver their cargo to recipient cells of a myriad of origins, such as microalgae, bacteria, higher plant, mammal, and human. MEVs can also deliver the cargo to the proper cell compartments, ensuring the proper expression and biological activity of cargo molecules, including those having complex biological pathways such as siRNA, mRNA, receptor-binding peptides, among others. The MEVs also can be loaded endogenously by genetically modified microalgae that encode RNA, DNA, and proteins for incorporation into the MEVs (see, copending U.S. provisional application Ser. No. 63/349,006, which details endogenous loading of MEVs). Cargo includes antigens and immunomodulatory molecules, including encoding nucleic acids, nucleic acid products, such as ligands and RNAi and other double-stranded RNA, and small molecules.

### C. EXTRACELLULAR VESICLES

[0302] Extracellular vesicles (EVs) are biomolecular structures released from plant and animal cells that play a role in cell-to-cell communication. Structurally, EVs are negatively charged lipid bilayer vesicles with a density of 1.13 to 1.19 g/mL. EVs are able to cross barriers such as the plasma (or cytoplasmic) membrane and the blood/brain barrier, and provide for the horizontal transfer of their functional contents (i.e., proteins, lipids, RNA molecules, and circulating DNA) from a donor to a recipient cell (Kuruvinashetti et al. (2020) 20^{th} International Conference on Nanotechnology 354-357). EVs also are naturally stable in various biological fluids, immunologically inert, and can exhibit organ-specific targeting abilities (Picciotto et al. (2021) Biomater. Sci. doi:10.1039/dObm01696a).

[0303] EVs contain endogenous lipids, nucleic acids, and proteins. Although results differ due to variations in isolation techniques and methods of analyzing the data, EVs generally contain proteins associated with the plasma membrane, cytosol and those involved in lipid metabolism (see, e.g., Doyle and Wang (2019) Cells 8(7):727). Proteins involved in the biogenesis of EVs (e.g., components of the ESCRTs), EV formation and release (e.g., RAB27A, RAB111B, and ARF6), signal transduction, and antigen presentation, as well as tetraspinins commonly occur in EVs (Abels and Breakefield (2016) Mol. Neurobiol. 36(3):301-312). EVs are enriched for cholesterol, sphingomyelin, glycosphingolipids, and phosphatidylserine (Kuruvinashetti et al. (2020) 20^{th} International Conference on Nanotechnology 354-357). Although a small number of studies have identified genomic and mitochondrial DNA in EVs, EVs are primarily enriched with endogenous small RNAs. Studies have identified mRNAs, miRNAs, rRNAs, long and short non-coding RNA, tRNA fragments, piwi-interacting RNA, vault RNA, and Y RNA in EVs. Most of the RNA that naturally occurs in EVs is ˜200 nucleotides long (with a small portion up to 4 kb) and thus it is fragmented, although circular RNAs also have been shown to be enriched and stable in EVs. RNA in EVs is protected from RNase digestion in the extracellular environment by the lipid bilayer (Abels and Breakefield (2016) Mol. Neurobiol. 36(3):301-312). The Exocarta, Vesiclepedia, and EVpedia databases are publicly available and provide data on the protein, nucleic acid, and lipid content of EVs (generally EVs from mammalian origin, such as human origin), as well as the isolation and purification procedures used, from EV studies (Abels and Breakefield (2016) Mol. Neurobiol. 36(3):301-312).

[0304] EVs are used by cells to mediate several physiological processes or affect various pathological conditions associated with the activation of an immune response or the spread of disease or infection, and also constitute cross-species communication and are in all kingdoms of life. Sources of EVs include mammalian cells, bacteria, bovine milk and plants (Adamo et al. (2021) J Extracell. Vesicles 10:e12081). Although plants and algae possess a cell wall outside their plasma membrane, which could be a physical barrier for the release of EVs, plants and algae release EVs (Picciotto et al. (2021) Biomater. Sci. doi:10.1039/dObm01696a).

### 1. Types of Extracellular Vesicles (EVs)

a. Exosomes

[0305] There are three primary subtypes of EVs; they are classified based on their biogenesis, mode of release, size, content, and function: microvesicles (MVs), exosomes, and apoptotic bodies (Doyle and Wang (2019) Cells 8(7):727). Exosomes, or intraluminal vesicles (ILVs) generally are 30-150 nm in diameter and are released through multivesicular bodies (MVBs) in the endosomal pathway. In the endosomal pathway, early endosomes form by inward budding of the plasma membrane and can transform into late endosomes, which accumulate ILVs by inward budding of the endosomal membrane. Late endosomes which contain a number of small vesicles are called MVBs. MVBs either fuse with the lysosome and are degraded, or the plasma membrane which releases the TLVs as exosomes into the extracellular space. The endosomal sorting complexes required for transport (ESCRT) pathway regulates MVB transportation and exosome formation and is reported to be the primary driver of exosome biogenesis, although other mechanisms of exosome biogenesis exist, including those mediated by the sphingolipid ceramide, which can facilitate membrane invagination, or proteins in the tetraspanin family. The ESCRT accessory proteins Alix, TSG101, HSC70 and HSP90β are often referred to as exosomal marker proteins (Doyle and Wang (2019) Cells 8(7):727).

[0306] Exosomes are released into the extracellular space by the fusion of the MVB limiting membrane with the plasma membrane. A number of proteins are involved in the release of exosomes, including Rab GTPases, diacylglycerol kinase a, and SNARE proteins (Abels and Breakefield (2016) Cell Mol. Neurobiol. 36(3):301-312).

[0307] Exosomes are candidates for drug delivery systems: they have a long circulating half-life; exosomes are tolerated by the human body and can penetrate cell membranes and target specific cell types; and they can be loaded with genetic material, a protein, or a small molecule (Doyle and Wang (2019) Cells 8(7):727).

b. Microvesicles

[0308] Microvesicles (MVs, or ectosomes) form by outward budding, or pinching, of the cell's plasma membrane, and have a diameter of 100 nm to 1 m. The formation of MVs involves cytoskeleton components, such as actin and microtubules, molecular motors such as kinesins and myosins, and fusion machinery such as SNAREs and tethering factors. The physiological state and microenvironment of the donor cell effects the number of MVs produced, and the physiological state and microenvironment of the recipient cell effects the number of MVs consumed. MVs also have a number of marker proteins, including cytosolic and plasma membrane associated proteins, as well as cytoskeletal proteins, heat shock proteins, integrins, and proteins containing post-translational modifications, although there are no known specific markers to distinguish MVs from exosomes. Like exosomes, MVs can be loaded with cargo (such as proteins, nucleic acids, and lipids) for delivery to another cell, thereby altering the recipient cell's functions (Doyle and Wang (2019) Cells 8(7):727).

c. Apoptotic Bodies

[0309] Apoptotic bodies are released by dying cells into the extracellular space, and have a diameter from 50 nm to 5000 nm. Apoptotic bodies are formed when the cell's plasma membrane separates from the cytoskeleton due to increased hydrostatic pressure after the cell contracts. Unlike exosomes and MVs, apoptotic bodies contain intact organelles, chromatin, and small amounts of glycosylated proteins (Doyle and Wang (2019) Cells 8(7):727).

### 2. Uptake of EVs

[0310] Cells internalize EVs by fusion with the plasma membrane, or more commonly by endocytosis (Abels and Breakefield (2016) Cell Mol. Neurobiol. 36(3):301-312). Uptake via endocytosis can be through several types of endocytotic processes, and different processes have been described in different cell types: clathrin-dependent endocytosis and phagocytosis have been described in neurons, macropinocytosis in microglia, phagocytosis and receptor-mediated endocytosis in dendritic cells, caveolin-mediated endocytosis in epithelial cells, and cholesterol- and lipid raft-dependent endocytosis in tumor cells. Blocking heparin sulfate proteoglycans (HSPGs) on the plasma membrane with heparin reduces the uptake of EVs in cell culture, as does blocking the scavenger receptor type B-1 (SR-B1) with a synthetic nanoparticle mimic of HDL, which suggests a role for HSPGs and SR-B1 in EV uptake (Abels and Breakefield (2016) Cell Mol. Neurobiol. 36(3):301-312). Fusion of EVs with the plasma membrane also is a method of uptake, and requires low pH conditions; treatment of EVs with the combination of a pH-sensitive fusogenic peptide with cationic lipids resulted in increased cellular uptake of exosomes and the cytosolic release of cargo within the exosomes (Nakase and Futaki (2015) Sci. Rep. 5:10112). Low pH conditions occur in tumors (Abels and Breakefield (2016) Cell Mol. Neurobiol. 36(3):301-312), so that EVs for delivering therapeutic payloads to tumor cells can enter cells through fusion with the plasma membrane.

[0311] Like cells, EVs have extracellular receptors and ligands on the outside and cytoplasmic proteins and nucleic acid on the inside, and thus communicate with cells in different ways. EVs bind to the cell surface, undergo endocytosis, and/or fuse with the plasma membrane, and release their cargos in the extracellular space. If entering by endocytosis, the EV cargo must escape the degradative pathway; late endosomes can fuse with lysosomes or the plasma membrane, so cargo must exit before it is degraded in a lysosome or re-released through the fusion of MVBs with the plasma membrane. EVs containing cargo, including mRNAs and non-coding RNAs, can be transferred to recipient cells in culture and in vivo (Abels and Breakefield (2016) Cell Mol. Neurobiol. 36(3):301-312; Maas et al. (2017) Trends Cell Biol. 27(3):172-188).

### 3. General Methods for Isolating EVs

a. Ultracentrifugation

[0312] Ultracentrifugation methods are used to isolate exosomes; alternative methods also have been developed. Due to the complex nature of the biological fluids from which exosomes are isolated, the overlap in physiochemical and biochemical properties between exosomes and other types of EVs, and the heterogeneity among exosomes, isolation methods can result in complex mixtures of EVs and other components of the extracellular space. Differential ultracentrifugation depends on the initial sedimentation of larger and denser particles from the extracellular matrix, and results in an enrichment of exosomes, but not a complete separation of exosomes from other components in the extracellular space. Density gradient centrifugation is another ultracentrifugation method and is based on separation by size and density in the presence of a density gradient (typically made of sucrose or iodixanol) in the centrifuge tube. Density gradient centrifugation effectively separates EVs from protein aggregates and non-membranous particles but has low exosome recovery, although purity can be improved by coupling differential ultracentrifugation with types of density gradient centrifugation, such as rate-zonal centrifugation or isopycnic centrifugation (Doyle and Wang (2019) Cells 8(7):727).

b. Size-Based Techniques

[0313] There are a number of size-based techniques for isolating exosomes (Doyle and Wang (2019) Cells 8(7):727). Ultrafiltration separates particles based on the size and molecular weight cut off of the membrane, whereby particles larger than the molecular weight cut off of the membrane are retained, and particles smaller than the molecular weight cut off of the membrane are passed through into the filtrate; low isolation efficiency can occur however if the filter becomes clogged and vesicles become trapped. The ExoMir™ Kit (Bioo Scientific; Austin, TX) is a commercially available kit in which two membranes (200 nm and 20 nm) are placed into a syringe and a sample (typically pre-treated with centrifugation and proteinase K) is passed through the syringe; the larger vesicles remain above the first 200 nm filter, the smallest vesicles are passed through the syringe and discarded, and the vesicles between 20 and 200 nm remain between the two filters in the syringe. Sequential filtration also relies on a series of filtration steps to isolate exosomes (Doyle and Wang (2019) Cells 8(7):727).

[0314] Size Exclusion Chromatography (SEC), often used in parallel with ultracentrifugation methods (in which the exosome pellet obtained from ultracentrifugation is resuspended and further purified using SEC), of exosomes is similar to using SEC to separate proteins. In SEC, a column is packed with a porous stationary phase in which small particles can penetrate and thus elute after larger particles. Typically, SEC methods require several hours of run time; however, the qEV Exosome Isolation Kit (iZON Science, New Zealand) allows for rapid and precise exosome isolation by SEC within 15 minutes (Doyle and Wang (2019) Cells 8(7):727).

[0315] In Flow Field-Flow Fractionation (FFFF), a sample injected into a chamber is subjected to parabolic flow as it is pushed down the chamber, in addition to a flow perpendicular to the parabolic flow, a crossflow, to separate particles in the sample. Larger particles are more affected by the crossflow and are pushed toward the walls of the chamber, which have a slower parabolic flow, and smaller particles remain in the center. Smaller particles elute earlier, and larger particles later, in FFFF (Doyle and Wang (2019) Cells 8(7):727).

[0316] In Hydrostatic Filtration Dialysis (HFD), hydrostatic pressure forces a sample through a dialysis tube with a membrane having a molecular weight cut-off of 1000 kDa. The result is that small solutes are able to pass through the tube, but larger particles, including exosomes and EVs, remain in the tube and can then be further separated using, for example, ultracentrifugation (Doyle and Wang (2019) Cells 8(7):727).

c. Immunoaffinity Capture-Based Techniques

[0317] Immunoaffinity capture-based techniques can isolate exosomes based on expression of an antigen on the surface of the exosome, and allow for the isolation of exosomes derived from a particular source. In these methods, an antibody specific for a target antigen can be attached to a plate (e.g., in Enzyme-Linked Immunosorbent Assay, ELISA), magnetic beads (e.g., in magneto-immunoprecipitation), resins and microfluidic devices; these surfaces are then exposed to the exosome sample, resulting in the immobilization of the exosomes expressing the antigen. This assay requires that the protein/antigen for isolating the exosomes be expressed on the surface of the exosomes, and its specificity is limited by the specificity of the antibody that is used, often resulting in a lower yield but higher purity of isolated exosomes. These methods also can be used to separate exosomes within mixed populations of EVs. Immunoaffinity capture-based techniques often are used after ultracentrifugation or ultrafiltration (Doyle and Wang (2019) Cells 8(7):727).

d. Exosome Precipitation

[0318] Methods for precipitation of exosomes include precipitation by polyethylene glycol (PEG) and lectin. In PEG precipitation, the PEG polymer ties-up the water molecules, allowing the other particles, including exosomes, to precipitate out of solution. PEG precipitation is quick and is not limited to the starting volume of solution, but lacks selectivity, as other EVs, extracellular proteins, and protein aggregates are precipitated with EVs. Sample pretreatment using filtration and/or ultracentrifugation can improve exosome yield. Commercially available kits for isolating exosomes using precipitation include, for example, ExoQuick® (System Biosciences, Palo Alto, CA) and Invitrogen™ Total Exosome Isolation Kit (Thermo Fisher Scientific, Waltham, MA). Alternatively, lectin precipitation can be used, typically after ultracentrifugation, whereby lectins bind to carbohydrates on the surface of exosomes, altering their solubility and leading to their precipitation out of solution (Doyle and Wang (2019) Cells 8(7):727).

e. Microfluidic Based Isolation Techniques

[0319] Microfluidic based techniques isolate exosomes based on their physical and biochemical properties simultaneously, and are rapid, efficient, and require small starting volumes. In acoustic nanofiltration, a matrix containing EVs and other cellular components is injected into a chamber and exposed to ultrasound waves. The particles respond differently to the radiation forces exerted by the waves, depending on their size and density; large particles experience stronger forces and migrate faster toward the pressure nodes. The immuno-based microfluidic isolation technique is similar to that of an ELISA, although, unlike ELISAs, it does not require prior ultrafiltration or ultracentrifugation of exosomes (Doyle and Wang (2019) Cells 8(7):727). The ExoChip (Kanwar et al. (2014) Lab Chip. 14(11):1891-1900) and ExoSearch Chip (Zhao et al. (2016) Lab Chip. 16(3):489-496) have been developed to isolate exosomes using microfluidic technology.

### 4. Microalgae and Microalgae-Derived Extracellular Vesicles (MEVs)

[0320] Taxonomy and classification of microalgae can vary. According to some schemes there are seven (7) divisions of microalgae: Euglenophyta (Euglenoids), Chrysophyta (Golden-brown algae and Diatoms), Pyrrophyta (Fire algae), Chlorophyta (Green algae), Rhodophyta (Red algae), Phaeophyta (Brown algae), and Xanthophyta (Yellow-green algae). Of interest herein are photosynthetic microalgae, such as the species Chlorella and Chlamydomonas. The methods and uses described herein use MEVs generally from green algae. Exemplary of such algae are Chlamydomonas and Chlorella, which belong to the classes Chlorophyceae and Trebouxiophyceae, respectively.

[0321] Microalgae are bioresources for the production of EVs for use in nanomedicine and other fields. The mechanism of secretion of EVs from microalgae is known in relation to primary and motile cilia/flagella (Picciotto et al. (2021) Biomater. Sci. doi:10.1039/dObm01696a). Chlamydomonas flagella are devoid of MVBs, thus, ciliary EVs shed from Chlamydomonas are classified as ectosomes. Studies have shown the shedding of ectosomes from flagellar and ciliary tips of the chlorophyte Chlamydomonas reinhardtii. EVs also have been observed along the length of the cilium in Chlamydomonas. Membrane budding and ciliary EV formation are mediated by components of the endosomal sorting complex required for transport (ESCRT), which are found in isolated ciliary transition zones, ciliary membranes, and ciliary EVs in Chlamydomonas and can act as sensors of membrane curvature. The formation of ciliary EVs also can occur when ciliary membrane trafficking is disrupted or during ciliary resorption (Wang and Barr (2018) Essays Biochem. 62(2):205-213). Ciliary ectosomes from Chlamydomonas contain a lytic enzyme that digests the mother cell wall and is required for the release of daughter cells. Ift88-null mutants that do not have flagella were unable to be released from the mother cell, and the addition of ciliary ectosomes from wild-type cells rescued the phenotype, suggesting a role for the flagella and intraflagellar transport (IFT) machinery in EV production (Wang and Barr (2016) Cell Mol. Neurobiol. 36(3):449-457).

[0322] EVs have been extracted from algal cells using ultra-centrifugation (Kuruvinashetti et al. (2020) 20^{th} International Conference on Nanotechnology 354-357). In accord with this method, algal cells are cultured; the cultured algal cells are collected and centrifuged; the supernatant is collected (and further centrifuged); a sucrose solution is added to the supernatant; and the algal supernatant with the sucrose solution is ultra-centrifuged; because of the sucrose solution, the high-density EVs settle at the bottom of the ultra-centrifugation tube and can be collected using a pipette. Extracted algal EVs can be characterized in size and concentration using Nanoparticle Tracking Analysis (NTA). Studies using this method have isolated green algal EVs that range in size from 25-200 nm, with a concentration of 0.89E8 to 0.94E8 particles/mL (Kuruvinashetti et al. (2020) 20^{th} International Conference on Nanotechnology 354-357).

[0323] An ultra-centrifugation protocol also can be used to isolate EVs from marine microalgae grown under various conditions; NTA showed that the nano-particles have a size distribution between 100 and 200 nm, and western blotting of proteins confirmed the presence of EV markers (VES4US, Extracellular vesicles from a natural source for tailor-made nanomaterials, 2020). Subsequent studies have identified microalgal small EVs (sEVs) isolated from the marine photosynthetic microalgal chlorophyte Tetraselmis chuii, termed nanoalgosomes. The production of nanoalgosomes is an evolutionarily conserved trait within microalgal strains as similar results were obtained using sEVs isolated from batch cultures of two other microalgae species, the chlorophyte Dunaliella tertiolecta, and the dinoflagellate Amphidinium sp. The nanoalgosomes were isolated using differential ultracentrifugation (dUC) and tangential flow filtration (TFF), as well as gradient ultracentrifugation, which was used to further purify samples enriched for small EVs by TFF or dUC. The isolated nanoalgosomes were shown to share characteristics of EVs from other sources. The EV yield (measured by sEV protein content and sEV number) from dUC and TFF was consistent with reported numbers of isolated EVs, around 10⁹ EV particles/g EV proteins. Biophysical analysis of particle size using multi-angle dynamic light scattering (DLS), nanoparticle tracking analysis (NTA), fluorescence nanoparticle tracking analysis (F-NTA), and fluorescence correlation spectroscopy (FCS) yielded consistent size distributions, with the size that appeared the most frequently from DLS (DLS mode) around 70 nm. Compared to exosomes derived from mammalian cells, which have a density of 1.15-1.19 g/mol, nanoalgosomes had a slightly lower density of 1.13 g/mol. Electron microscopy revealed that the nanoalgosomes are spherical, heterogeneous in size and shape, and possess a lipid-bilayer structure. Compared to the microvesicles (or large EVs, lEVs) and lysates, the sEVs were enriched for three of the four target protein biomarkers (Alix, enolase, HSP70 and β-actin). DLS measurements indicated that the nanoalgosomes were resistant to changes in pH and stable in human blood plasma. The tumorigenic MDA-MB-231 breast cancer cell line, the non-tumorigenic 1-7 HB2 cell line, and the human hepatocarcinoma Hep G2 cell line did not show cytotoxic or genotoxic effects after nanoalgosome treatment. Furthermore, the nanoalgosomes were taken up by the MDA-MB-231 and 1-7 HB2 cell lines (Adamo et al. (2021) J. Extracell. Vesicles 10:e12081).

[0324] EVs have been isolated from at least eighteen microalgae strains (Ankistrodesmus sp., Brachiomonas sp., Chlamydomonas reinhardtii, Dunaliella tertiolecta, Tetraselmis chuii, Chloromonas sp., Rhodella violacea, Kirchneriella sp., Pediastrum sp., Nannochloropsis sp., Cyanophora paradoxa, Cryptomonas pyrenoidifera, Phaeodactylum tricornutum, Phaeothamnion sp., Diacronema sp., Isochrysis galbana, Stauroneis sp., and Amphidinium sp.) from the main microalgal lineages that have been studied, including strains with a variety of features such as saltwater and freshwater inhabitants, small and large sized cells, colonial and single cells, and species with sequenced genomes.

[0325] MEVs can be isolated using a differential ultracentrifugation protocol and characterized following the International Society for Extracellular Vesicles (ISEV) guidelines. All strains tested showed the presence of MEVs in the culture medium. EV-producing microalgae strains were established based on the EV protein content, the expression of EV protein markers (e.g., Alix, Hsp70, enolase, and β-actin), the total scattering signal (measured by dynamic light scattering, DLS) or total particle number (measured by NTA), and the sEV average size and size range. These EV-producing strains include Cyanophora paradoxa, Tetraselmis chuii, Amphidinium sp., Rhodella violacea, Diacronema sp., Dunaliella tertiolecta, Phaeodactylum tricornutum, Pediastrum sp., and Phaeothamnion sp. (Picciotto et al. (2021) Biomater. Sci. doi:10.1039/dObm01696a). The data for Cyanophora paradoxa showed ˜2×10⁹ sEV particles per mL of microalgal-conditioned media, with strong positive signals for EV markers, and a size distribution with a mode of 130±5 nm, in agreement with data from plant-derived vesicles. Cytotoxicity and genotoxicity studies showed that sEVs isolated from Cyanophora paradoxa, a freshwater Glaucophyte, did not show toxicity on the tumorigenic MDA-MB-231 breast cancer or C2C12 myoblast cell lines, neither over time nor at different concentrations, nor did MDA-MB-231 cells treated with the sEVs show morphological nuclear changes associated with apoptotic events (Picciotto et al. (2021) Biomater. Sci. doi:10.1039/dObm01696a).

[0326] EVs also have been isolated from Synechocystis sp. PCC6803 (a cyanobacterium), Chlamydomonas reinhardtii (a green microalgae), Euglena gracilis (an euglenophyte), and Haematococcus pluvialis (a chlorophyte) in work done by Zhao et al., who also performed RNomic and proteomic analyses in EVs isolated from C. reinhardtii at different stages of cell growth and under different types of abiotic stress (Zhao et al. (2020) doi:10.21203/rs.3.rs-38027/v1). EVs were isolated using differential ultracentrifugation and filtration, and the resuspension was shown to contain membrane structures with small clumps of particles 110-120 nm in diameter, in line with the reported diameter of exosomes and small MVs, although there were differences in diameters between the species of microalgae. Specifically, EVs from C. reinhardtii had diameters between 37-710 nm, with an average particle diameter of 120.1 nm. Synechocystis-derived EVs had diameters between 24-450 nm, with an average particle size of 94.68 nm. Despite the presence of a cell wall, Chlamydomonas cells were able to uptake EVs, as shown by the presence of EVs labeled with a fluorescent lipophilic dye inside microalgal cells. Thus, microalgal EVs can be absorbed by recipient cells. Non-coding RNAs were detected in microalgal EVs at different growth stages and treatment (biotic stress, nitrogen depletion, and nitrogen recovery), and proteomic analyses identified many flagellar-associated membrane proteins in microalgal EVs (Zhao et al. (2020) doi:10.21203/rs.3.rs-38027/v1).

[0327] These studies show that microalgae produce EVs that can be isolated using traditional or standard methods; microalgal-derived EVs are similar in size and concentration, and exhibit similar markers compared to EVs isolated from other species; EVs isolated from microalgae do not show cytotoxic or genotoxic effects in vitro; and that microalgal-derived EVs can be taken up by cells.

[0328] It has been shown that EVs from mammalian origin can deliver cargo to a target cell and thus have therapeutic use for delivery of a variety of cargos for use in treating a number of diseases or conditions; this has not been shown for in general for MEVs. Mammalian EVs, except for bovine milk EVs, however, cannot be administered orally because they do not survive the harsh conditions of the stomach. For example, small molecules such as hydrophobic and hydrophilic drugs can be injected into exosomes, or macromolecular proteins and nucleic acids can be embedded into the exosomes. The nucleic acids can include those encoding a gene of interest. Specific targeting ligands, imaging probes, and covalent linkage could be attached to the exosome surface and tracked using NTA, fluorescence, or by bioluminescence.

[0329] Besides a mention in a publication that microalgae EVs possibly can be used to deliver a drug of interest to a targeted cell, tissue, or organ (Kuruvinashetti et al. (2020) 20^{th} International Conference on Nanotechnology 354-357), there is no published evidence nor technical descriptions for use of MEVs for delivery for treatment of mammalian disease, disorders, or conditions. There are no publications or technical descriptions describing how knowledge for application of EV technology to microalgae-derived extracellular vesicles, nor whether it is possible to do so, nor how to do so. Prior studies have not considered Chlorella species, nor have the prior studies assessed biodistribution and related properties of the MEVs in general. Hence methods, such as methods of oral delivery, exemplified herein with Chlorella, can employ MEVs from other microalgae.

[0330] As described and shown herein, however microalgal EVs have a number of advantages over the use of existing drug delivery systems, such as, exosomes derived from mesenchymal stem cells, gold nanoparticles, liposomes and other plant- and animal-derived EVs. Mesenchymal stem cells are a commonly used source of exosomes, and exosomes derived from mesenchymal stem cells are used in drug delivery, for example, anti-cancer vaccines, because they have enhanced passive targeting (a method of preparing a drug carrier system so that it remains circulating in the blood stream). Mesenchymal stem cell derived EVs possess the ability to passively target due to their small size, indigenous nature, and their ability to cross biological barriers. Mesenchymal stem cells, however, have limited secretion of exosomes, and scaling up production of exosomes is difficult due to the need to optimize purification, increase the homogeneity of exosomes, and establish efficient transfection strategies. Nanoparticles can lead to toxicity and current techniques for synthesizing nanoparticles limit their ability to scale for manufacturing purposes. Nanoparticle and liposome-based drug delivery methods also can lead to the formation of a teratoma (a tumor comprised of several different types of tissue). Liposome-based drug delivery methods have been further shown to be less efficient for internalization into a specific cell, tissue or organ, compared to exosomes. Plant-derived EVs, such as those from curcumin, ginger, grapefruit, and lemon, have been used for drug delivery, but their extraction process and use in treatment has not yet been optimized. The production of EVs from agricultural products, such as fruits and milk, is economically impractical and need 3-4 months to grow, compared to algal EVs, which can be grown anywhere and within a few days. Algal EVs avoid phagocytosis or degradation by macrophages and circulate for prolonged times in vivo, and have low immunogenicity. Algal EVs also have a lower risk of teratoma formation. Algae, thus, provide a source from which pure, well-characterized EVs of high quality can be obtained (Kuruvinashetti et al. (2020) 20^{th} International Conference on Nanotechnology 354-357). Kuruvinashetti et al. does not describe the use of Chlorella species as a source of EVs, nor its advantages as a source. Prior art does not describe the biodistribution of MEVs per se, nor the implications thereof for administration of MEVs with drugs directed to particular organs, tissues, or systems.

[0331] It is shown and described herein that MEVs bypass stringent biological barriers, including the gastrointestinal barrier, as well as the blood-brain barrier, and choroid-retina barrier, and provide for effective delivery to the lungs and mucosal surfaces of other organs.

### 5. Green Algae—Chlorella Species

[0332] Previous studies and consideration of EVs have not focused on nor assessed Chlorella species as sources of EVs. Chlorella and the resulting EVs have advantages for growth, manipulation, and administration of drugs that other species and EVs do not provide. Green algae belong to phylum Chlorophyta, and encompass a diverse group of photosynthetic eukaryotes. Green algae include unicellular and multicellular organisms. Algae originally included in the genus Chlorella are among the most widely distributed and frequently encountered algae in freshwater. These algae exist in aqueous environments and on land. They are typically small (˜2 to 10 m in diameter), unicellular, spherical in shape, non-motile, and contain a single chloroplast, and some have a rigid cell wall (Blanc et al. (2010) Plant Cell 22(9):2943-2955).

[0333] Molecular analyses have separated Chlorella species into two classes of chlorophytes: the Trebouxiophyceae, which contains the true Chlorella; and the Chlorophyceae. For use herein, Chlorella species include any that can be or that are used as food complement or that can be consumed by humans or other animals, such as livestock. Exemplary species include, but are not limited to, the species: Chlorella ellipsoidea, Chlorella pyrenoidosa, Chlorella sorokiniana, Chlorella vulgaris, and Chlorella variabilis.

[0334] True Chlorella species are characterized by glucosamine as a major component of their rigid cell walls. Although most Chlorella species are naturally free-living, the Trebouxiophyceae include most of the known green algal endosymbionts, living in lichens, unicellular eukaryotes, plants, and animals (for example mussels and hydra). For example, Chlorella variabilis NC64A is a hereditary photosynthetic endosymbiont (or photobiont) of Paramecium bursaria, a unicellular protozoan, and NC64A also is a host for a family of large double-stranded DNA viruses that occur in freshwater (Blanc et al. (2010) Plant Cell 22(9):2943-2955).

a. Life Cycle

[0335] In unicellular organisms, such as microalgae, life cycle is the same as the cell cycle. Chlorella is a haploid organism that reproduces asexually by autosporulation. The cell cycle and proliferation of Chlorella vulgaris has been investigated using flow cytometric analysis of 5(6)carboxyfluorescein diacetate N-succinimidyl ester (CFSE)-stained algal cells by Rioboo et al. Their results indicate that, as generally described for microalgae, the growth of C. vulgaris mother cells takes place during light periods, whereas cytoplasmic division and liberation of daughter cells takes place during dark periods. C. vulgaris also shows a distinct light/dark cycle, marked by an increase in cell size, cell complexity, and autofluorescence during periods of light, measured over a 96-hour period. A monoparametric histogram of CFSE-stained C. vulgaris cells showing only one peak of daughter cells indicates that each mother cell undergoes only one division cycle in 96 hours; the cytoplasmic division was further shown to take place during periods of darkness. Thus, the strain of C. vulgaris used exhibits three life cycle phases: 1) growth of mother cells, 2) cell division, and 3) liberation of daughter cells. C. vulgaris cells grew during 2 light periods and began to divide during following dark period; cell division occurs once the mother cells are double the size of daughter cells. Furthermore, C. vulgaris cells exposed to the herbicide terbutryn need a longer growth period in order to reach a large enough cell size to divide. This suggests there is a critical threshold size needed for C. vulgaris to complete the growth phase and begin the division phase, and that this critical threshold can control the progression of the G1 phase of the C. vulgaris cell cycle. Finally, this study demonstrates that the intensity of the peak of CFSE-fluorescence of mother cells is four times greater than that of the daughter cells, indicating that 4 daughter cells are produced from each mother cell. Thus, C. vulgaris cells undergo a first mitosis followed by cytoplasmic division, and then two other simultaneous mitoses, which result in the liberation of 4 daughter cells (Rioboo et al. (2009) doi:10.1016/j.aquatox.2009.07.009).

b. Genomic Analyses of Chlorella Species

[0336] Although species of Chlorella are reported to be non-motile and lack a sexual cycle, genomic analyses of Chlorella variabilis NC64A (NC64A) and Chlorella vulgaris 211/11P (211/11P) reveal the presence of genes involved in sexual reproduction and motility (Blanc et al. (2010) Plant Cell 22(9):2943-2955; Cecchin et al. (2019) Plant J. 100(6):1289-1305). The NC64A nuclear genome (GenBank® Accession No. ADIC00000000.1) is 46.2 Mb, and composed of 12 chromosomes. The meiosis-specific proteins dosage suppressor of MCk1 DMC1, homologous-pairing proteins HOP1 and HOP2, meiotic recombination protein MER3, meiotic nuclear division protein MND1, and mutS homolog protein MSH4 are encoded in NC64A; these genes also occur in most of the other sequenced chlorophyte algal species. Nineteen homologs of the Chlamydomonas gametolysin proteins, which promote disassembly of the gametic cell walls and allow gamete fusion, also were identified in NC64A. Additionally, an ortholog of the Chlamydomonas GCS1 protein, which is essential for cell fusion, occurs in NC64A (Blanc et al. (2010) Plant Cell 22(9):2943-2955). The primary genes involved in meiosis also occur in the Chlorella vulgaris 211/11P 40 Mb genome (GenBank® Accession No. SIDB00000000), in addition to the gene encoding gametolysin (g3347), and a gene encoding a protein that contains a domain with a putative GCS1/HAP2 function (Cecchin et al. (2019) Plant J. 100(6):1289-1305). Thus, although Chlorella species have been observed only in the haploid phase, the presence of meiosis genes indicates that the life cycle of Chlorella could include a diploid phase.

[0337] Similarly, while flagella have not been observed in NC64A, orthologs of the Chlamydomonas flagellar proteins were identified in the NC64A genome, including orthologs to the intraflagellar transport (IFT) proteins IFT52, IFT57, and IFT88, kinesin-2 motor protein FLA8, the kinesin-associated protein KAP, and proteins involved in the axonemal outer dynein arm (Blanc et al. (2010) Plant Cell 22(9):2943-2955).

[0338] Sequencing of three Chlorella sorokiniana strains, strain 1228, UTEX 1230, and DOE1412, reveals the presence of sex- and flagella-related genes (Hovde et al. (2018) Algal Research 35:449-461). The genome of several other Chlorella species has been sequenced: Chlorella protothecoides sp. 0710 (Gao et al. (2014) BMC Genomics 15(1):582; GenBank® Accession No. APJO00000000); Chlorella sorokiniana UTEX 1602 (GenBank® Accession No. LHPG00000000) and Chlorella sp. strain SAG 241.80 (Micractinium conductrix; GenBank® Accession No. LHPF00000000) (Arriola et al. (2018) Plant J. 93(3):566-586); and the Chlorella vulgaris strains UTEX 395 (Guarnieri et al. (2018) Front. Bioeng. Biotechnol. 6:37; GenBank® Accession No. LDKB00000000), UMT-M1 (Teh et al. (2019) Data Brief 27:104680; GenBank® Accession No. VJNP00000000), UTEX 259 (GenBank® Accession No. VATW00000000) and NJ-7 (Wang et al. (2020) Mol. Biol. Evol. 37(3):849-863; GenBank® Accession No. VATV00000000).

c. Commercial and Biotechnological Uses of Chlorella

[0339] The commercial cultivation of microalgae for food purposes began with the production of Chlorella vulgaris in Japan and Taiwan in the 1960s. Dried biomass products from Arthrospira and Chlorella are included in dietary supplements due to reports of high protein content, nutritive value, and health benefits. For example, Chlorella extracts have been shown to lower cholesterol and have antioxidant, antibacterial, and antitumor activities. Production of high yields of Chlorella is routine, and, as detailed herein, MEVs can be isolated from the cell culture medium. For its use as a pharmaceutical, it is known that ingestion of Chlorella is non-toxic and non-immunogenic in humans.

[0340] Chlorella has been used in a variety of biotechnology applications, including biofuels, sequestering CO₂, producing molecules of high economic value, or removing heavy metals from wastewaters (Blanc et al. (2010) Plant Cell 22(9):2943-2955). Chlorella species show metabolic flexibility in response to environmental perturbations, and are capable of using nutrients, such as organic carbon and minerals, directly from wastewater for growth. Among microalgae, Chlorella species have higher photosynthetic efficiency over other photosynthetic organisms. Additionally, Chlorella vulgaris is able to grow either in autotrophic, heterotrophic or mixotrophic conditions (Zuñiga et al. (2016) Plant Physiol. 172(1):589-602).

[0341] Chlorella species also can be genetically modified by Agrobacterium-mediated transformation. A study by Cha et al. developed a method to genetically transform Chlorella vulgaris using the Agrobacterium tumefaciens strain LBA4404, and the presence of gene fragments in 30% of the transgenic lines, compared to the wild-type non-infected Chlorella, indicates the T-DNA was integrated into the Chlorella genome (Cha et al. (2012) World J. Microbiol. Biotechnol. 28:1771-1779).

d. Chlorella MEVs

[0342] As described herein, Chlorella species, such as C. vulgaris, are advantageous species for the production of EVs, referred to herein as MEVs, for use for delivery of biomolecules and small molecules for many applications, including therapeutic, diagnostic, and cosmetic uses. Of particular interest herein are MEVs produced by Chlorella species. Chlorella EVs have not been exploited as sources of MEVs for exogenous loading of biomolecular products or small molecule drugs or diagnostic agents. Chlorella, as a source of EVs for such applications, provides numerous advantages. Chlorella is a haploid organism, which means that specific and targeted variants can be produced by genetic engineering; it readily can be genetically modified or loaded to produce or contain biologically active molecules and small molecules. Stable cell lines can be produced, including stable producers of encoded products. They are defined products, and, when exogenously loaded, the resulting compositions contain EVs that contain the same cargo.

[0343] Detailed genetic maps can be obtained, and correlations between genotype and phenotype can be established. Chlorella genomes have been fully sequenced, so the structure and function of various genes can be known. Phylogenetically, Chlorella is at the very crossroads between higher plants and microalgae. As such, Chlorella shares with higher plants a significant (and useful) number of molecular biological and metabolic features, but still is a unicellular haploid microalgae. Exemplary of molecular biological features shared with eukaryotes is the intracellular machinery that involves the dicer enzyme system for processing exogenous RNA into siRNA. Chlorella is autotrophic; unlike mammalian and other animal cells, it can therefore be cultured and reproduced without the need for nutrients or factors of animal origin.

[0344] With respect to use of its EVs as therapeutics, Chlorella species are not toxic. For example, tablets made from Chlorella vulgaris biomass (i.e., compressed whole Chlorella cells) have been consumed regularly for years by the public worldwide as a dietary supplement, without constraints related to toxicity or immunogenicity. Japan is the world leader in the consumption of Chlorella biomass. It also is used, for example, in Japan, for medical treatments because it has shown to have immunomodulatory properties and purported anti-cancer activities, for use for anti-aging applications, such as for cardiovascular diseases, hypertension and cataracts; it reduces the risk of atherosclerosis and stimulates the synthesis of collagen for the skin.

[0345] Chlorella cells naturally produce extracellular vesicles (EVs) that respond to the ‘standard specifications' of better known EVs (such as mammalian EVs). EVs from plant origin bear a number of features that make them more promising/convenient than synthetic nanoparticles or semisynthetic EVs, for use as a drug delivery system in humans. These include, for example, higher stability, lower toxicity, and lower immunogenicity. Being as close to plants as it is, Chlorella provides a source of EVs with similar characteristics to plant EVs. At the same time, mass production of Chlorella in large scale is easier and cheaper than for higher plants. The glycosylation pattern of membrane proteins in Chlorella is similar/identical to the glycosylation pattern present in higher plants.

[0346] The size of the Chlorella MEVs ranges between about or between 50 nm and 200 m, with an average size of about 130 nm. The morphology resembles plant and mammalian exosomes. For use for administration, the size distribution can be rendered more uniform by separating the MEVs by size and selecting those of a size of interest, which can vary depending upon the intended use and route of administration.

### D. EXOGENOUSLY LOADED MICROALGAE EXTRACELLULAR VESICLES (MEVS), CARGO, AND TARGETS

[0347] Targets and cargo (see discussions below) include any known to those of skill in the art. Sections F and G and examples below describe the biodistribution of MEVs following administration by various routes, and the implications, uses and methods for targeting or treating particular diseases, disorders, and conditions, and for formulating and administering the MEVs.

### 1. Isolation of MEVs

[0348] Methods for isolation are discussed in the sections above and detailed in the Examples.

### 2. MEV Loading and Cargos

[0349] The MEVs can be loaded with any desired cargo (also referred to as a payload), including, but not limited to, nucleic acid molecules, including, for example RNAi, plasmids, anti-sense nucleic acids, nucleic acids encoding the RNAi or anti-sense nucleic acid, detectable marker proteins and tags, small molecule drugs, gene editing systems, and others, and combinations thereof. The MEVs can deliver therapeutic molecules, can serve as vaccines, and can be used in human and other animal health, agricultural applications, gene therapy applications, including delivery genes, modification of genes with gene editing systems, and gene silencing nucleic acids, cosmetic applications, dermatological applications, diagnostic applications, industrial uses, and others. The MEVs can deliver nutrients, or regulators of gene pathways to produce a beneficial product, and can be used to deliver gene editing systems, such as CRISPR/Cas and to effect gene editing. The MEVs can be used to deliver gene therapy vectors, such as, but not limited to, adeno-associated (AAV) virus vectors, adenovirus vectors, vaccinia virus-derived vectors, and others, including products for effecting gene therapy.

[0350] Diseases and conditions that can be treated include any known to those of skill in the art, including but not limited to, cardiovascular diseases, metabolic diseases, infections, including respiratory infections, bladder infections and other urinary tract infections, infectious diseases, including viral disease, such as hepatitis, HIV, corona viruses, including SARS-Cov-2, CNS diseases, ocular diseases, and liver diseases. As discussed, delivered cargo includes protein products, such as antibodies and antigen-binding forms thereof, RNA products, such as, but not limited to, siRNA, miRNA (micro RNA), lncRNA (long non-coding RNA), saRNA (small activating RNA), shRNA, and mRNA, nucleic acid encoding the products, such as plasmids, nucleic acid products such as DNA encoding anti-sense oligonucleotides and also the anti-sense oligonucleotides, and small molecule drugs.

[0351] The MEVs can carry cargos that include reporter genes and proteins and other detectable products, such as, for example, a fluorescent protein, such as, but not limited to an enhanced green fluorescent protein (EGFP; SEQ ID NO:10), a luciferase gene (SEQ ID NO:11), luxA (SEQ ID NO:8), luxB (SEQ ID NO:9), and the Lux operon (luxCDABE and luxABCDE; SEQ ID NO:12). Other cargos provided herein include antigens, antibodies, immunomodulators, discussed in sections throughout the disclosure.

[0352] Extracellular vesicles and exosomes also can be used to transfer therapeutic agents such as nucleic acids, such as microRNA, mRNA, tRNA, rRNA, siRNA, regulatory RNA, non-coding and encoding RNA, DNA fragments, and DNA plasmids (see, e.g., CN105821081A and CN110699382A); nucleotides or amino acids comprising a detectable moiety or a toxin or that disrupts transcription or translation, respectively; polypeptides (e.g., enzymes); lipids; carbohydrates; and small molecules (e.g., small molecule drugs and toxins) (see, U.S. Pat. No. 10,195,290). Non-limiting examples of proteins that can be encoded for by the nucleic acid cargo molecule include, but are not limited to: antibodies, intrabodies, single chain variable fragments, affibodies, enzymes, transporters, tumor suppressors, viral or bacterial inhibitors, cell component proteins, DNA and/or RNA binding proteins, DNA repair inhibitors, nucleases, proteinases, integrases, transcription factors, growth factors, apoptosis inhibitors and inducers, toxins, structural proteins, neurotrophic factors, membrane transporters, nucleotide binding proteins, heat shock proteins, CRISPR-associated proteins, cytokines, cytokine receptors, caspases and any combination and/or derivatives thereof (see, e.g., AU2018365299).

Reporter Genes, Reporter Proteins, and/or Modulators Thereof can be Delivered in the MEVs.

### Reporter Proteins

[0353] Target sequences, in the form of siRNAs, miRNAs, anti-sense oligonucleotides (ASOs), peptides and/or tetratricopeptides, to modulate (inhibition or stimulation) each of the marker genes, such as a GFP protein, a eukaryotic luciferase, or a prokaryotic Luciferase, such as: Lux operon (luxCDABE) and lux operon (luxABCDE), can be used, for example for diagnostics and gene expression assessments (SEQ ID NOs:5-6, 7, and 62-65, respectively):

| | Type of | |
|---|---|---|
| Target gene | sequence | Sequence(s) |
| EGFP | siRNA | sense: 5′-GCAAGCUGACCCUGAAGUUCAUUU-3′ |
| | | antisense: 5′-AUGAACUUCAGGGUCAGCUUGCCG-3′ |
| firefly luciferase | shRNA | 5′-CTGACGCGGAATACTTCGA-3′ |
| luxA | siRNA | sense: 5′-CAAACAGAGGUAAUGAAAUGGUUG-3′ |
| (Lux operon) | | antisense: 3′-CAACCAUUUCAUUACCUCUGUUUG-5′ |
| luxB | siRNA | sense: 5′-AUGUUAAGUUGAAUAAGUUCUGCA-3′ |
| (Lux operon) | | antisense: 3′-UGCUCUUGAAUAAGUUGAAUUGAU-5′ |

[0354] Cargo for purposes herein includes antigens for producing or inducing an immune response against a pathogen or for treating or preventing a disease, disorder, or condition.

[0355] Cargo can include immunomodulatory agents that increase or modulate the immune response to the vaccines that increase or decrease production of one or more cytokines, up- or down-regulate self-antigen presentation, mask MHC antigens, or promote the proliferation, differentiation, migration, or activation state of one or more types of immune cells. Examples of immunomodulatory agents include but are not limited to non-steroidal anti-inflammatory drugs (NSAIDs) such as aspirin, ibuprofen, celecoxib, diclofenac, etodolac, fenoprofen, indomethacin, ketorolac, oxaprozin, nabumetone, sulindac, tolmetin, rofecoxib, naproxen, ketoprofen, and nabumetone; steroids (e.g., glucocorticoids, dexamethasone, cortisone, hydroxycortisone, methylprednisolone, prednisone, prednisolone, triamcinolone, azulfidine eicosanoids such as prostaglandins, thromboxanes, and leukotrienes; as well as topical steroids such as anthralin, calcipotriene, clobetasol, and tazarotene); cytokines such as TGFβ, IFNα, IFNβ, IFNγ, IL-2, IL-4, IL-10; cytokine, chemokine, or receptor antagonists including antibodies, soluble receptors, and receptor-Fc fusions, B7, CCR2, CCR5, CD2, CD3, CD4, CD6, CD7, CD8, CD11, CD14, CD15, CD17, CD18, CD20, CD23, CD28, CD40, CD40L, CD44, CD45, CD52, CD64, CD80, CD86, CD147, CD152, complement factors (C5, D), CTLA4, eotaxin, Fas, ICAM, IFNα, IFNβ, IFNγ, IFNAR, IgE, IL-1, IL-2, IL-2R, IL-4, IL-5R, IL-6, IL-8, IL-9 IL-12, IL-13, IL-13R1, IL-15, IL-18R, IL-23, integrins, LFA-1, LFA-3, MHC, selectins, TGFβ, TNFα, TNFβ, TNF-R1, T-cell receptor, including Enbrel® (etanercept), Humira® (adalimumab), and Remicade® (infliximab); heterologous anti-lymphocyte globulin; other immunomodulatory molecules such as 2-amino-6-aryl-5 substituted pyrimidines, anti-idiotypic antibodies for MHC binding peptides and MHC fragments, azathioprine, brequinar, Bromocriptine, cyclophosphamide, cyclosporine A, D-penicillamine, deoxyspergualin, FK506, glutaraldehyde, gold, hydroxychloroquine, leflunomide, malononitriloamides (e.g., leflunomide), methotrexate, minocycline, mizoribine, mycophenolate mofetil, rapamycin, and sulfasalazine.

[0356] Other cargo includes cytokines which include, but are not limited to lymphokines, monokines, and traditional polypeptide hormones. Included among the cytokines are growth hormones such as human growth hormone, N-methionyl human growth hormone, and bovine growth hormone; parathyroid hormone; thyroxine; insulin; proinsulin; relaxin; prorelaxin; glycoprotein hormones such as follicle stimulating hormone (FSH), thyroid stimulating hormone (TSH), and luteinizing hormone (LH); hepatic growth factor; fibroblast growth factor; prolactin; placental lactogen; tumor necrosis factor-alpha and -beta; Mullerian-inhibiting substance; mouse gonadotropin-associated peptide; inhibin; activin; vascular endothelial growth factor; integrin; thrombopoietin (TPO); nerve growth factors such as NGF-beta; platelet-growth factor; transforming growth factors (TGFs) such as TGF-alpha and TGF-beta; insulin-like growth factor-I and -II; erythropoietin (EPO); osteoinductive factors; interferons such as interferon-alpha, -beta, and -gamma; colony stimulating factors (CSFs) such as macrophage-CSF (M-CSF); granulocyte-macrophage-CSF (GM-CSF); and granulocyte-CSF (G-CSF); interleukins (TLs) such as IL-1, IL-1alpha, IL-2, IL-3, IL-4, IL-5, IL-6, IL-7, IL-8, IL-9, IL-10, IL-11, IL-12; IL-15, a tumor necrosis factor such as TNF-alpha or TNF-beta; and other polypeptide factors including LIF and kit ligand (KL).

[0357] Other exemplary cargo includes cytokines and other agents that stimulate cells of the immune system and enhance desired effector function. For example, agents that stimulate NK cells include IL-2; agents that stimulate macrophages include but are not limited to C5a, formyl peptides such as N-formyl-methionyl-leucyl-phenylalanine. Cargo include agents that stimulate neutrophils, such as, for example, G-CSF and GM-CSF. Additional agents include, but are not limited to, interferon gamma, IL-3 and IL-7.

### 3. Generation of Payload-Loaded MEVs

[0358] As shown herein, the isolated Chlorella can be loaded with cargo for delivery to humans by any suitable route, including but not limited to intravenous, oral, topical, mucosal, inhalation, and any other routes known to those of skill in the art for delivery of vehicles, such as lipid nanoparticles, vectors, therapeutic bacteria, and therapeutic viruses. Upon administration, the MEVs are taken up by cells. Any cargo presently delivered in vectors, bacteria, exosomes, nanoparticles, and other such delivery vehicles can be loaded into the MEVs provided herein. The loaded cargo can be selected so that it only is expressed or produced in targeted cells, such as in instances in which the cargo is a plasmid encoding a therapeutic product. Transcription regulatory signals can be selected so that the encoded product is expressed in targeted cells. For example, for expression in the liver, the encoded product can be expressed under control of a liver-specific promoter, or the product can be targeted to a receptor or target expressed in targeted cells, such as in tumors or in the tumor microenvironment. Loading methods, described above, and in the Examples below, include, but are not limited to:
[0359] a. Electroporation
[0360] b. Sonication
[0361] c. Extrusion
[0362] d. Surfactants
[0363] e. Other Methods known to those of skill in the art for introducing exosomes into cells.

### 4. Exemplary Cargo and Exemplary Uses of the Exogenously Loaded MEVs

a. Cargo

[0364] As described above, the MEVs are loaded with cargo that can be used for any purpose of interest, including any for which other delivery vehicles are used. These uses include delivery of mRNA, such as mRNA encoding corona virus spike proteins and modified spike proteins to improve the immune response to the viruses, RNAi, such as siRNA, and anti-sense RNA, or anti-sense DNA (ASO), to silence genes, such as bacterial and viral pathogen virulence genes, antibiotic resistance genes, antimicrobial resistance genes, genes that suppress the immune system, tumor genes, such as oncogenes, and host factors for viral infection, such as targeting angiotensin-converting enzyme-2 (ACE2), transmembrane protein serine 2 (TMPRSS2), and other such genes. The cargo also can include any therapeutic antibodies. Therapeutic antibodies, include, but are not limited to, anti-cancer antibodies, antibodies to treat autoimmune or inflammatory disease, antibodies to treat transplant rejection, antibodies to treat graft-versus-host-disease (GVHD), and antibodies to treat infectious diseases.

### 1) RNA Cargo

[0365] The mechanism of RNA interference or RNAi was originally described as a process of sequence-specific silencing of gene expression in the nematode Caenorhabditis elegans (Fire et al. (1998) Nature 391(6669):806-11; Fire and Mello, 2006 Nobel Prize in Medicine awarded to Andrew Fire and Craig Mello). The process of small RNAs targeting (and silencing) messenger RNAs involves a particular RNAi machinery (including silencing factors, such as DICER and ARGONAUTE).

[0366] In the plant kingdom, RNAi is involved in antiviral defense mechanisms, and in defense mechanisms against phytopathogenic fungi and oomycetes. Small regulatory RNAs can be active in silencing genes inside bacterial cells, which lack the said RNAi machinery. The silencing activity of siRNA has been demonstrated to be inter-kingdom (see, e.g., PCT/EP2019/072169, published as International PCT Publication No: WO2020/035619; PCT/EP2019/072170, published as WO2020/035620; Singla et al. (2019c) bioRxiv, doi: doi.org/10.1101/863902).

[0367] RNAi-mediated regulation of gene expression has been exploited for several years in the field of biotechnology to confer resistance to viruses (Baulcombe (2015) Current Opinion in Plant Biology 26:141-146). The inter-kingdom RNAi has been used to characterize the function of genes of eukaryotic pathogens/parasites as well as to induce protection against these organisms.

[0368] In Drosophila and Caenorhabditis, RNAi plays a crucial role in antiviral defense by directly targeting viral RNAs via the small RNAs produced by the host in response to viruses. Recent work has shown that plant EVs naturally loaded (loaded by the plant cells producing the EVs) with small RNAs, from human edible plants, can modify the composition of the human gut microbiota and oral microbiota by silencing the expression of specific genes in certain commensal bacteria (Teng et al. (2018) Cell Host & Microbes 24:637-652; Sundaram et al. (2019) iScience 21:308-327).

[0369] Small interfering RNAs (siRNAs) and microRNAs (miRNAs) are noncoding RNAs with important roles in gene regulation. They have recently been investigated as novel classes of therapeutic agents for the treatment of a wide range of disorders including cancers and infections. Clinical trials of siRNA- and miRNA-based drugs have already been initiated. siRNAs and miRNAs share many similarities, both are short duplex RNA molecules that exert gene silencing effects at the post-transcriptional level by targeting messenger RNA (mRNA), yet their mechanisms of action and clinical applications are distinct. The major difference between siRNAs and miRNAs is that the former are highly specific with only one mRNA target, whereas the latter have multiple targets. The siRNAs and miRNAs have a role in gene regulation, and serve as targets for drug discovery and development. Compared with conventional small therapeutic molecules, siRNAs and miRNAs offer the potential to be highly potent and able to act on “non-druggable” targets (for example, proteins which lack an enzymatic function); moreover, RNAi can be designed to target and/or affect expression of any gene of interest.

### 2) Antibody Cargo

[0370] Examples of anti-cancer antibodies and other antibodies, include, but are not limited to, anti-17-1A cell surface antigen antibodies such as the antibody sold or provided under the trademark Panorex® (edrecolomab); anti-4-1BB antibodies; anti-4Dc antibodies; anti-A33 antibodies such as A33 and CDP-833; anti-α1 integrin antibodies such as natalizumab; anti-α4β7 integrin antibodies such as LDP-02; anti-αVβ1 integrin antibodies such as F-200, M-200, and SJ-749; anti-aV03 integrin antibodies such as abciximab, CNTO-95, Mab-17E6, and Vitaxin®; anti-complement factor 5 (C5) antibodies such as 5G1.1; anti-CA125 antibodies such as sold or provided under the trademark OvaRex® (oregovomab); anti-CD3 antibodies such as those sold or provided under the trademark Nuvion® (visilizumab) and Rexomab™; anti-CD4 antibodies such as IDEC-151, MDX-CD4, OKT4A; anti-CD6 antibodies such as Oncolysin B and Oncolysin CD6; anti-CD7 antibodies such as HB2; anti-CD19 antibodies such as B43, MT-103, and Oncolysin B; anti-CD20 antibodies such as 2H7, 2H7.v16, 2H7.v114, 2H7.v115, the product sold or provided under the trademark Bexxar® (tositumomab), the antibody sold or provided under the trademark Rituxan® (rituximab), and the antibody sold or provided under the trademark Zevalin® (Ibritumomab tiuxetan); anti-CD22 antibodies such as the those sold or provided under the following generic names, tradenames, or trademarks: Lymphocide® (epratuzumab); anti-CD23 antibodies such as IDEC-152; anti-CD25 antibodies such as basiliximab and Zenapax® (daclizumab); anti-CD30 antibodies such as AC10, MDX-060, and SGN-30; anti-CD33 antibodies such as gemtuzumab ozogamicin (sold under the trademark Mylotarg®), Oncolysin M, and Smart M195; anti-CD38 antibodies; anti-CD40 antibodies such as SGN-40 and toralizumab; anti-CD40L antibodies such as 5c8, Antova®, and IDEC-131; anti-CD44 antibodies such as bivatuzumab; anti-CD46 antibodies; anti-CD52 antibodies such as alemtuzumab (sold under the trademark Campath®); anti-CD55 antibodies such as SC-1; anti-CD56 antibodies such as huN901-DM1; anti-CD64 antibodies such as MDX-33; anti-CD66e antibodies such as XR-303; anti-CD74 antibodies such as IMMU-110; anti-CD80 antibodies such as galiximab and IDEC-114; anti-CD89 antibodies such as MDX-214; anti-CD123 antibodies; anti-CD138 antibodies such as B-B4-DM1; anti-CD146 antibodies such as AA-98; anti-CD148 antibodies; anti-CEA antibodies such as cT84.66, labetuzumab, and Pentacea®; anti-CTLA-4 antibodies such as MDX-101; anti-CXCR4 antibodies; anti-EGFR antibodies such as ABX-EGF, cetuximab (such as the product sold under the trademark Erbitux®), IMC-C225, and Merck Mab 425; anti-EpCAM antibodies such as Crucell's anti-EpCAM, ING-1, and KS-IL-2; anti-ephrin B2/EphB4 antibodies; anti-Her2 antibodies such as tratuzumab (trademark Herceptin®), MDX-210; anti-FAP (fibroblast activation protein) antibodies such as sibrotuzumab; anti-ferritin antibodies such as NXT-211; anti-FGF-1 antibodies; anti-FGF-3 antibodies; anti-FGF-8 antibodies; anti-FGFR antibodies, anti-fibrin antibodies; anti-G250 antibodies such as WX-G250 and Girentuximab (sold under the trademark Rencarex®); anti-GD2 ganglioside antibodies such as EMD-273063 and TriGem®; anti-GD3 ganglioside antibodies such as BEC2, KW-2871, and mitumomab; anti-gpIIb/IIIa antibodies such as ReoPro®; anti-heparinase antibodies; anti-Her2/ErbB2 antibodies such as trastuzumab, MDX-210, and pertuzumab; anti-HLA antibodies (such as the product sold under the trademark Oncolym®), Smart 1D10; anti-HM1.24 antibodies; anti-ICAM antibodies such as ICM3; anti-IgA receptor antibodies; anti-IGF-1 antibodies such as CP-751871 and EM-164; anti-IGF-1R antibodies such as IMC-A12; anti-IL-6 antibodies such as CNTO-328 and elsilimomab; anti-IL-15 antibodies (such as the product sold under the trademark HuMax®-IL15); anti-KDR antibodies; anti-laminin 5 antibodies; anti-Lewis Y antigen antibodies such as Hu3S193 and IGN-311; anti-MCAM antibodies; anti-Muc antibodies such as BravaRex and TriAb; anti-NCAM antibodies such as ERIC-1 and ICRT; anti-PEM antigen antibodies such as Theragyn and Therex; anti-PSA antibodies; anti-PSCA antibodies such as IG8; anti-Ptk antibodies; anti-PTN antibodies; anti-RANKL antibodies such as AMG-162; anti-RLIP76 antibodies; anti-SK-1 antigen antibodies such as Monopharm C; anti-STEAP antibodies; anti-TAG72 antibodies such as CC49-SCA and MDX-220; anti-TGF-0 antibodies such as CAT-152; anti-TNF-α antibodies such as CDP571, CDP870, D2E7, adalimumab (such as the product sold under the trademark Humira®), and infliximab (such as the product sold under the trademark Remicade®); anti-TRAIL-R1 and TRAIL-R2 antibodies; anti-VE-cadherin-2 antibodies; and anti-VLA-4 antibodies (such as the product sold under the trademark Antegren®). Furthermore, anti-idiotype antibodies including but not limited to the GD3 epitope antibody BEC2 and the gp72 epitope antibody 105AD7, can be used. In addition, bispecific antibodies including but not limited to the anti-CD3/CD20 antibody Bi20 can be used.

[0371] Additional exemplary cargo, uses and treatments that can be effected with cargo-loaded MEVs are described, by way of example, as follows.

b. Diseases and Methods of Treatment

[0372] As described above, the MEVs can be loaded with any desired cargo, including, but not limited to, nucleic acid molecules, detectable marker proteins and tags, small molecule drugs, gene editing systems, and others, and combinations thereof for delivering therapeutic molecules, serving as vaccines, and for use in human and other animal health, agricultural, cosmetic, dermatological and diagnostic applications, industrial uses, and other uses. The MEVS provided herein are for use as vaccines and immunomodulators, and for treating or preventing (reducing the risk of) a disease, disorder, or condition involving a pathogen or a cancer or a disease, disorder, or condition in which treatment or prevention involves immune modulation. In particular, the MEVs provided herein can elicit an immune response that includes IgG antibodies and/or IgA antibodies. The MEVs can contain cargo for treatment or prevention of a disease, disorder, or condition involving or caused by a pathogen, such as a bacterium, virus, fungi, or parasite, or an inflammatory a disease, disorder, or condition, such as an allergy, asthma, autoimmune disease, cancer, or any such disease, disorder, or condition.

[0373] MEVs can be used to deliver DNA or mRNA molecules that encode therapeutically useful polypeptides, and/or to deliver polypeptides, peptides, and proteins.

### E. ENDOGENOUSLY LOADED (ENDO-LOADED) MICROALGAE EXTRACELLULAR VESICLES (MEVS), CARGO, AND TARGETS

[0374] For use as vaccines and/or for delivery of any nucleic acid or polypeptides cargo, the MEVs can be endogenously loaded (endo-loaded). The uses and selection of cargo, with the understanding that the cargo has to be produced by the microalgae and/or the host cell, administration is the same as for exo-loaded. For endo-loaded MEVs, DNA encoding a product of interest, such as a protein, mRNA, synthetic pathway, or other product, is introduced into the microalgae cell by any suitable method. Methods for introducing DNA into a microalgae cell are known in the art (for a review see, e.g., Gutierrez et al. (2021) Biology 10:265).

[0375] Heterologous DNA can be introduced into microalgae by a variety of methods, including but not limited to, mechanical agitation, surfactant permeabilization, electroporation, particle bombardment, bacterial DNA transfer, nanoparticles, liposomes, and cell penetrating peptides or cell penetrating polymers to mediate penetration into the cell, and other methods known to those of skill in the art for introducing DNA into plant cells, particularly microalgae cells. For example, microalgae cells can be transformed by Agrobacterium tumefaciens transformation using the Ti plasmid of the agrobacterium. This process is well-known to those of skill in the art. The Ti plasmid, into which DNA of interest can be cloned, introduces DNA into the microalgae genome. The DNA of interest integrates into the microalgae genome. To prepare endo-loaded MEVs, DNA that encodes the heterologous product to be endo-loaded in the MEVs, is introduced into the microalgae and the microalgae produces the heterologous product, such as a protein, or mRNA.

[0376] Targets and cargo (see discussions below) include any known to those of skill in the art. For endo-loading, the heterologous product must be one that is produced by or loaded into the microalgae cell, and from the cell into the cell-produced MEVs.

### 1. Choice and Preparation of Cargo

[0377] The MEVs can be endogenously loaded with any suitable heterologous cargo, including, but not limited to, nucleic acid molecules, including, for example RNAi, such as siRNA, miRNA, lncRNA, and mRNA, including modified mRNA, encoding coding any protein, polypeptide and peptide, detectable marker proteins and tags or any therapeutic or prophylactic or vaccine polypeptide or peptide, gene editing systems, and others, and combinations thereof. The MEVs can deliver therapeutic molecules, can serve as vaccines, and can be used in human health, gene therapy applications, including delivery genes, modification of genes with gene editing systems, and gene silencing nucleic acids, cosmetic applications, dermatological applications, diagnostic applications, industrial uses, and others. The MEVs can deliver regulators of gene pathways to produce a beneficial product, and can be used to deliver gene editing systems, such as CRISPR/cas (see e.g., SEQ ID NOs: 73 and 74 for exemplary CRISPR/cas protein and encoding nucleic sequences, respectively) to effect gene editing.

[0378] Diseases and conditions that can be treated include any known to those of skill in the art, including but not limited to, cardiovascular diseases, metabolic diseases, infections, including respiratory infections, bladder infections and other urinary tract infections, infectious diseases, including viral disease, such as hepatitis, HIV, corona viruses, including SARS-CoV-2, CNS diseases, ocular diseases, and liver diseases. As discussed, delivered cargo includes protein products, such as, but not limited to, enzymes, regulatory factors, signaling proteins, antigens, antibodies and antigen-binding forms thereof, RNA products, such as, but not limited to, siRNA, miRNA (micro RNA), lncRNA (long non-coding RNA), saRNA (small activating RNA), shRNA, and mRNA, including modified mRNA, such as modified mRNA to increase stability for delivery.

[0379] An advantage of MEVs for delivery, is that the RNA is a labile molecule, and so, mRNAs delivered by other kinds of nanoparticles, like lipid nanoparticles (LNPs) have been modified to increase RNA stability. For delivery in MEVs, the mRNA does not necessarily have to be modified. For endo-loading, the mRNA, in general, the mRNA will be unmodified. In all instances, the cargo for endo-loaded MEVs includes peptides, small peptides, polypeptides and proteins, nucleic acid encoding the proteins, including various forms of RNA, such as mRNA. The nucleic acids can be operably linked to regulatory elements that are recognized in the particular subject, such as a mammal, in which they are to be delivered.

| Target | | |
|---|---|---|
| organ/ | | Exemplary route of |
| tissue | Exemplary indication | administration |
| Lung | Cystic Fibrosis | Inhalation |
| Lung | Cystic Fibrosis | Inhalation |
| Lung | Idiopathic Pulmonary Fibrosis | Inhalation |
| Lung | Primary Ciliary Dyskinesia | Inhalation |
| Lung | Pulmonary Arterial | Inhalation |
| | Hypertension | |
| Liver | Inborn error of metabolism | Intravenous or direct |
| | | injection into the liver |
| Lung | Covid-19 (preventive or | Intranasal or Inhalation |
| | therapeutic) | |
| Lymphatic | Covid-19 (vaccine) | Intravenous or intramuscular |
| Lung | Influenza (preventive or | Intranasal or Inhalation |
| | therapeutic) | |
| Lymphatic | Influenza (vaccine) | Intravenous or intramuscular |
| Lymphatic | Viral pathogen | Intravenous or intramuscular |
| Lymphatic | Bacterial pathogen | Intravenous or intramuscular |

### 2. Genetic Engineering of Producer Cells

[0380] The endogenously loaded MEVs from Chlorella can be used for delivery to humans by any suitable route, including but not limited to intravenous, oral, topical, mucosal, intratracheal, inhalation, intranasal, and any other routes known to those of skill in the art for delivery of vehicles, such as lipid nanoparticles, vectors, therapeutic bacteria, and therapeutic viruses. Upon administration, the MEVs are taken up by cells. Any heterologous cargo suitable to be obtained in the producer cells can be loaded into the MEVs provided herein. The loaded heterologous cargo can be selected so that it only is expressed or produced in targeted cells. Transcription regulatory signals can be selected so that the encoded product is expressed in targeted cells. For example, for expression in the liver, the encoded product can be expressed under control of a liver-specific promoter, or the product can be targeted to a receptor or target expressed in targeted cells, such as in tumors or in the tumor microenvironment. MEVs, once produced, are isolated by methods used for isolating MEVs for subsequent exogenous loading.

### 3. Cargo

[0381] Cargo includes any of the antigens and immunomodulators as described herein for vaccines and polypeptides and nucleic acids as described above for exogenously-loaded cargo. As described above, the MEVs are loaded with cargo that can be used for any purpose of interest, including any for which other delivery vehicles are used. These uses include delivery of mRNA, such as mRNA encoding an antigen, therapeutic antibodies, and other such cargo.

[0382] Microalgae MEVs, for example, can be endogenously loaded with mRNA, For delivery of mRNA, however, the microalgae can be transformed, such as with a plasmid encoding the mRNA, where the encoded mRNA contains regulatory signals, or generally lacks one or more regulatory signals or sites for binding ribosomal proteins, so that the mRNA is produced, but is not translated by the microalgae cells or other eukaryotic cells. The nucleic acid, such as plasmid encoding the mRNA can be designed so that the mRNA is produced in abundance. This can be accomplished by operatively linking the mRNA sequences of interest to a strong eukaryotic promoter, including plant promoters, algae and microalgae promoters, or virus promoters, and optionally other regulatory sequences, such enhancers, in a plasmid that is introduced into the microalgae cells, such as by methods exemplified herein or any other methods known to those of skill in the art. The mRNA then is expressed at high levels, but is not translated, and becomes packaged in the MEVs produced by the microalgae cells. Exemplary promoters include plant promoters. Sequences of plant promoters are well known (see, e.g., Shahmuradov et al. (2003) PlantProm: a database of plant promoter sequences Nucleic Acids Res. 31: 114-117, softberry.com/plantprom2016/).

[0383] Regulatory signals and binding sites for controlling translation are well known. The following is an overview and description of signals and sites in mRNA that can be modified or deleted so that the mRNA is not translated (for a review, see, Fatima Gebauer et al. (2004) Nature Reviews Molecular Cell Biology 5:827-835). Structural features and regulatory sequences within the mRNA include: the canonical end modifications of mRNA molecules—the cap structure and the poly(a) tail—which are required for translation initiation; internal ribosome-entry sequences (IRESs), which mediate cap-independent translation initiation; upstream open reading frames (uORFs and sORFs), which normally reduce translation from the main ORF; secondary or tertiary RNA structures, such as hairpins and pseudoknots, which generally block initiation, but can also be part of IRES elements and therefore promote cap-independent translation; and, specific binding sites for regulatory complexes. Most of the regulatory mechanisms that are inhibitory; absent any change, mRNAs are translated. For endogenously packaging mRNA in MEVs, the mRNA that is encoded by DNA introduced into the microalgae cells can be modified, such as by deletion of the IRES, or modifying or interfering with ribosome binding proteins, or other such methods known to those of skill in the art.

[0384] In some embodiments, the microalgae cells are transformed with a plasmid that is then integrated into the genome, and mRNA is transcribed (produced). Alternatively, a plasmid that remains episomal can be introduced. The mRNA can be translated by the microalgae ribosomes. In other embodiments, the mRNA can contain modifications so that it is optimized or designed for translation in an animal, such as a human, subject. For example, the mRNA can contain optimized codons for expression in a subject, such as human, for translation so that it is not efficiently or not translated by the microalgae ribosomes, but is translated by higher order species, such as animal, such as a human. The mRNA can be “optimized for codons” (“codon optimization”) that translate well in the cell type where the mRNA is intended to be translated. The encoding plasmid sequence can be “optimized for codons” such that the mRNA will not be translated, or translated inefficiently by microalgae ribosomes, but is translated by mammalian ribosomes, or will in such a way that the mRNA transcribed out of that plasmid will not translate (or will do it very inefficiently) in the microalgae cell but will efficiently translate in the cells of those to whom the MEVs are administered. For example, the IRES and/or Kozak sequences encoded in the mRNA can be optimized or designed for expression or efficient or high expression in a mammal, not microalgae. Other regulatory elements can be optimized or designed for translation in cells of the target host, such as mammalian host, or a particular cell type.

[0385] mRNA generally includes the m7GpppN cap structure at the 5′ end of the mRNA, and the poly(A) tail at the 3′ end, which are motifs that promote translation initiation. Secondary structures, such as hairpins, block translation. Internal ribosome entry sequences (IRESs) mediate cap-independent translation. Upstream open reading frames (uORFs) normally function as negative regulators by reducing translation from the main ORF. Also included are binding sites for proteins and/or RNA regulators, which usually inhibit, but also promote, translation. These sequences can be optimized for translation in the intended host, such as mammalian cell, and/or selected so that they are not or not efficiently translated by the microalgae ribosomes, but are translated by mammalian, such as human, ribosomes. For example, the mRNA can include a Kozak sequence that is optimized for mammalian translation.

### 1) Protein Cargo

[0386] Protein cargo includes therapeutic proteins. These can be encoded by DNA introduced into the microalgae cell by any method known to the skilled person, such as those discussed above. The DNA can include regulatory sequences, such as strong promoters, to ensure production of a relatively large amount of the protein, that is then packaged in the MEVs. The protein cargo is encoded by DNA constructs that include regulatory sequences, as well as codon optimization, for an efficient transcription and, subsequently, translation in the microalgae. The nucleic acid will include appropriate sequences for translation into proteins. In general, the constructs will include strong promoters, such as strong plant promoters, and eukaryotic viral promoters, as well as enhancers to ensure that high levels of proteins are produced in the microalgae cells and packaged in the MEVs.

### F. PHARMACEUTICAL COMPOSITIONS, FORMULATIONS, KITS, ARTICLES OF MANUFACTURE AND COMBINATIONS

### 1. Pharmaceutical Compositions and Formulations

[0387] The compositions containing the MEVs and loaded MEVs provided herein can be formulated as pharmaceutical compositions provided for administration by a desired route, such as oral and intramuscular (IM) delivery of the cargo to the immune system. Pharmaceutically acceptable compositions are prepared in view of approvals for a regulatory agency or other agency prepared in accordance with generally recognized pharmacopeia for use in animals and in humans, and also, for agricultural applications, for plants. Typically, compounds are formulated into pharmaceutical compositions using techniques and procedures well-known in the art (see e.g., Ansel Introduction to Pharmaceutical Dosage Forms, Fourth Edition, 1985, 126).

[0388] The pharmaceutical compositions provided herein are for use for therapeutic and prophylactic applications. The MEVs and cargo-loaded MEVs provided herein can be formulated with a pharmaceutically acceptable carrier or diluent. Generally, such pharmaceutical compositions include components that do not significantly impair the biological properties or other properties of the cargo. Each component is pharmaceutically and physiologically acceptable so that it is compatible with the other ingredients and not injurious to the subject to whom it is to be administered. The formulations can be provided in unit dosage form and can be prepared by methods well-known in the art of pharmacy, including but not limited to, tablets, pills, powders, liquid solutions or suspensions (e.g., including injectable, ingestible and topical formulations, for example, eye drops, gels, pastes, creams, or ointments), aerosols (e.g., nasal sprays and inhalers), liposomes, suppositories, pessaries, injectable and infusible solutions and sustained release forms. See, e.g., Gilman, et al. (eds. 1990) Goodman and Gilman's: The Pharmacological Bases of Therapeutics, 8^{th} Ed., Pergamon Press; and Remington's Pharmaceutical Sciences, 17^{th} ed. (1990), Mack Publishing Co., Easton, Pa.; Avis, et al. (eds. 1993) Pharmaceutical Dosage Forms: Parenteral Medications Dekker, NY; Lieberman, et al. (eds. 1990) Pharmaceutical Dosage Forms: Tablets Dekker, NY; and Lieberman, et al. (eds. 1990) Pharmaceutical Dosage Forms: Disperse Systems Dekker, NY. When administered systemically, the therapeutic composition is sterile, pyrogen-free, generally free of particulate matter, and in a parenterally acceptable solution having due regard for pH, isotonicity, and stability. These conditions are known to those skilled in the art. Methods for preparing parenterally administrable compositions are well-known or will be apparent to those skilled in the art and are described in more detail in, e.g., “Remington: The Science and Practice of Pharmacy (Formerly Remington's Pharmaceutical Sciences)”, 19^{th} ed., Mack Publishing Company, Easton, Pa. (1995).

[0389] Pharmaceutical compositions provided herein can be in various forms, e.g., in solid, semi-solid, liquid, powder, aqueous, and lyophilized form. Examples of suitable pharmaceutical carriers are known in the art and include but are not limited to water, buffering agents, saline solutions, phosphate buffered saline solutions, various types of wetting agents, sterile solutions, alcohols, gum arabic, vegetable oils, benzyl alcohols, gelatin, glycerin, carbohydrates such as lactose, sucrose, amylose or starch, magnesium stearate, talc, silicic acid, viscous paraffin, perfume oil, fatty acid monoglycerides and diglycerides, pentaerythritol fatty acid esters, hydroxy methylcellulose, and powders, among others. Pharmaceutical compositions provided herein can contain other additives including, for example, antioxidants, preservatives, antimicrobial agents, analgesic agents, binders, disintegrants, coloring, diluents, excipients, extenders, glidants, solubilizers, stabilizers, tonicity agents, vehicles, viscosity agents, flavoring agents, emulsions, such as oil/water emulsions, emulsifying and suspending agents, such as acacia, agar, alginic acid, sodium alginate, bentonite, carbomer, carrageenan, carboxymethylcellulose, cellulose, cholesterol, gelatin, hydroxyethyl cellulose, hydroxypropyl cellulose, hydroxypropyl methylcellulose, methylcellulose, octoxynol-9, oleyl alcohol, povidone, propylene glycol monostearate, sodium lauryl sulfate, sorbitan esters, stearyl alcohol, tragacanth, xanthan gum, and derivatives thereof, solvents, and miscellaneous ingredients such as crystalline cellulose, microcrystalline cellulose, citric acid, dextrin, dextrose, liquid glucose, lactic acid, lactose, magnesium chloride, potassium metaphosphate, and starch, among others (see, generally, Alfonso R. Gennaro (2000) Remington: The Science and Practice of Pharmacy, 20^{th} Edition. Baltimore, MD: Lippincott Williams & Wilkins). Such carriers and/or additives can be formulated by conventional methods and can be administered to the subject at a suitable dose. Stabilizing agents such as lipids, nuclease inhibitors, polymers, and chelating agents can preserve the compositions from degradation within the body.

[0390] The route of administration is in accord with known methods, e.g., injection or infusion by intravenous, intraperitoneal, intracerebral, intramuscular, subcutaneous, intraocular, intraarterial, intrathecal, inhalation or intralesional routes, topical, rectal, mucosal, and by sustained release systems. The MEVs or cargo-loaded MEVs can be administered continuously by infusion or by bolus injection. One can administer the MEVs or cargo-loaded MEVs in a local or systemic manner.

[0391] The MEVs or cargo-loaded MEVs can be prepared in a mixture with a pharmaceutically acceptable carrier. Techniques for formulation and administration of the compounds are known to one of skill in the art (see e.g., “Remington's Pharmaceutical Sciences,” Mack Publishing Co., Easton, Pa.). This therapeutic composition can be administered intravenously or through the nose or lung, such as a liquid or powder aerosol (lyophilized). The composition also can be administered parenterally or subcutaneously as desired. When administered systematically, the therapeutic composition should be sterile, pyrogen-free and in a parenterally acceptable solution having due regard for pH, isotonicity, and stability. These conditions are known to those skilled in the art.

[0392] Pharmaceutical compositions suitable for use include compositions wherein the MEVs or cargo-loaded MEVs are contained in an amount effective to achieve their intended purpose. Determination of a therapeutically effective amount is well within the capability of those skilled in the art. Therapeutically effective dosages can be determined by using in vitro and in vivo methods, and/or by a skilled person.

[0393] Therapeutic formulations can be administered in many conventional dosage formulations. Dosage formulations of MEVs and cargo-loaded MEVs provided herein are prepared for storage or administration by mixing the compound having the desired degree of purity with physiologically acceptable carriers, excipients, or stabilizers. Such materials are non-toxic to the recipients at the dosages and concentrations employed, and can include buffers such as Tris HCl, phosphate, citrate, acetate and other organic acid salts; antioxidants such as ascorbic acid; low molecular weight (less than about ten residues) peptides such as polyarginine, proteins, such as serum albumin, gelatin, or immunoglobulins; hydrophilic polymers such as polyvinylpyrrolidone; amino acids such as glycine, glutamic acid, aspartic acid, or arginine; monosaccharides, disaccharides, and other carbohydrates including cellulose or its derivatives, glucose, mannose, or dextrins; chelating agents such as EDTA; sugar alcohols such as mannitol or sorbitol; counterions such as sodium, and/or nonionic surfactants such as polysorbates (TWEEN), pluronics, polyethylene glycol, and others.

[0394] In particular examples herein, provided are pharmaceutical compositions that contain a stabilizing agent. The stabilizing agent can be an amino acid, amino acid derivative, amine, sugar, polyol, salt or surfactant. In some examples, the stable co-formulations contain a single stabilizing agent. In other examples, the stable co-formulations contain 2, 3, 4, 5 or 6 different stabilizing agents. For example, the stabilizing agent can be a sugar or polyol, such as a glycerol, sorbitol, mannitol, inositol, sucrose or trehalose. In particular examples, the stabilizing agent is sucrose. In other examples, the stabilizing agent is trehalose. The concentration of the sugar or polyol is from or from about 100 mM to 500 mM, 100 mM to 400 mM, 100 mM to 300 mM, 100 mM to 200 mM, 200 mM to 500 mM, 200 mM to 400 mM, 200 mM to 300 mM, 250 mM to 500 mM, 250 mM to 400 mM, 250 mM to 300 mM, 300 mM to 500 mM, 300 mM to 400 mM, or 400 mM to 500 mM, each inclusive.

[0395] In examples, the stabilizing agent can be a surfactant that is a polypropylene glycol, polyethylene glycol, glycerin, sorbitol, poloxamer and polysorbate. For example, the surfactant can be a polypropylene glycol, polyethylene glycol, glycerin, sorbitol, poloxamer and polysorbate, such as a poloxamer 188, polysorbate 20 and polysorbate 80. In particular examples, the stabilizing agent is polysorbate 80. The concentration of surfactant, as a % of mass concentration (w/v) in the formulation, is between or about between 0.005% to 1.0%, 0.01% to 0.5%, 0.01% to 0.1%, 0.01% to 0.05%, or 0.01% to 0.02%, each inclusive.

[0396] When used for in vivo administration, the formulation should be sterile and can be formulated according to conventional pharmaceutical practice. This is readily accomplished by filtration through sterile filtration membranes, prior to or following lyophilization and reconstitution. The MEVs or cargo-loaded MEVs can be stored in lyophilized form or in solution; they can be frozen or refrigerated. Other vehicles such as naturally occurring vegetable oil like sesame, peanut, or cottonseed oil or a synthetic fatty vehicle like ethyl oleate can be included. Buffers, preservatives, and antioxidants can be incorporated according to accepted pharmaceutical practice.

[0397] The MEVs or cargo-loaded MEVs provided herein, can be provided at a concentration in the composition of from or from about 0.1 to 10 mg/mL or higher or lower amounts, depending upon the application and the subject, such as, for example a concentration that is at least or at least about 0.1, 0.2, 0.3, 0.4, 0.5, 0.6, 0.7, 0.8, 0.9, 1.0, 1.5, 2.0, 2.5, 3.0, 3.5, 4.0, 4.5, 5.0, 5.5, 6.0, 6.5, 7.0, 7.5, 8.0, 8.5, 9.0, 9.5, 10 mg/mL or more. The volume of the solution can be at or about 1 to 100 mL, such as, for example, at least or about at least or 0.5, 1, 2, 3, 4, 5, 10, 15, 20, 25, 30, 35, 40, 45, 50, 55, 60, 65, 70, 75, 80, 85, 90, 95, 100 mL or more. In some examples, the MEVs or cargo-loaded MEVs are supplied in phosphate buffered saline.

[0398] The MEVs or cargo-loaded MEVs provided herein can be provided as a controlled release or sustained release composition. Polymeric materials are known in the art for the formulation of pills and capsules which can achieve controlled or sustained release of the MEVs and cargo-loaded MEVs provided herein (see, e.g., Medical Applications of Controlled Release, Langer and Wise (eds.), CRC Pres., Boca Raton, Fla. (1974); Controlled Drug Bioavailability, Drug Product Design and Performance, Smolen and Ball (eds.), Wiley, New York (1984); Langer and Peppas (1983) J Macromol. Sci. 23:61; see also Levy et al. (1985) Science 228:190; During et al. (1989) Ann. Neurol. 25:351; Howard et al. (1989) J. Neurosurg. 71:105; U.S. Pat. Nos. 5,679,377, 5,916,597, 5,912,015, 5,989,463, 5,128,326; and PCT Publication Nos. WO 99/15154 and WO 99/20253). Examples of polymers used in sustained release formulations include, but are not limited to, poly(2-hydroxy ethyl methacrylate), poly(methyl methacrylate), poly(acrylic acid), poly(ethylene-co-vinyl acetate), poly(methacrylic acid), polyglycolides (PLG), polyanhydrides, poly(N-vinyl pyrrolidone), poly(vinyl alcohol), polyacrylamide, poly(ethylene glycol), polylactides (PLA), poly(lactide-co-glycolides) (PLGA), and polyorthoesters. Generally, the polymer used in a sustained release formulation is inert, free of leachable impurities, stable on storage, sterile, and biodegradable. Any technique known in the art for the production of sustained release formulation can be used to produce a sustained release formulation containing the MEVs or cargo-loaded MEVs provided herein.

[0399] In some examples, the pharmaceutical composition contains the MEVs or cargo-loaded MEVs provided herein and one or more additional agents, such as an antibody or other therapeutic, for combination therapy.

### 2. Articles of Manufacture/Kits and Combinations

[0400] Pharmaceutical compositions of the MEVs or cargo-loaded MEVs can be packaged as articles of manufacture containing packaging material, a pharmaceutical composition which is effective for treating a disease or condition that can be treated by administration of the particular MEVs or cargo-loaded MEVs, such as the diseases and conditions described herein or known in the art, and a label that indicates that the cargo, such as an antibody or nucleic acid molecule, is to be used for treating the infection, disease or disorder. The pharmaceutical compositions can be packaged in unit dosage forms containing an amount of the pharmaceutical composition for a single dose or multiple doses. The packaged compositions can contain a lyophilized powder of the pharmaceutical compositions containing the cargo-loaded MEVs which can be reconstituted (e.g., with water or saline) prior to administration.

[0401] The articles of manufacture provided herein contain packaging materials. Packaging materials for use in packaging pharmaceutical products are well-known to those of skill in the art (see, e.g., U.S. Pat. Nos. 5,323,907, 5,052,558 and 5,033,252). Examples of pharmaceutical packaging materials include, but are not limited to, blister packs, bottles, tubes, inhalers (e.g., pressurized metered dose inhalers (MDI), dry powder inhalers (DPI), nebulizers (e.g., jet or ultrasonic nebulizers) and other single breath liquid systems), pumps, bags, vials, containers, syringes, bottles, and any packaging material suitable for a selected formulation and intended mode of administration and treatment.

[0402] The MEVs or cargo-loaded MEVs can be provided as combinations and as kits. Kits optionally can include one or more components such as instructions for use, devices and additional reagents (e.g., sterilized water or saline solutions for dilution of the compositions and/or reconstitution of lyophilized protein), and components, such as tubes, containers and syringes for practice of the methods. Exemplary kits can include the MEVs or cargo-loaded MEVs provided herein, and can optionally include instructions for use, a device for administering the MEVs or cargo-loaded MEVs to a subject, a device for detecting MEVs or cargo-loaded MEVs in samples obtained from a subject, and a device for administering an additional therapeutic agent to a subject.

[0403] The kit can, optionally, include instructions. Instructions typically include a tangible expression describing the MEVs or cargo-loaded MEVs, and, optionally, other components included in the kit, and methods for administration, including methods for determining the proper state of the subject, the proper dosage amount, dosing regimens, and the proper administration method for administering the MEVs or cargo-loaded MEVs. Instructions also can include guidance for monitoring the subject over the duration of the treatment time.

[0404] Kits also can include a pharmaceutical composition described herein and an item for diagnosis. For example, such kits can include an item for measuring the concentration, amount or activity of the MEVs and cargo-loaded MEVs, in a subject.

[0405] In some examples, the MEVs or cargo-loaded MEVs are provided in a diagnostic kit for the detection of the MEVs or cargo-loaded MEVs or cargo in an isolated biological sample (e.g., tumor cells, such as circulating tumor cells obtained from a subject or tumor cells excised from a subject).

[0406] Kits provided herein also can include a device for administering the MEVs to a subject. Any of a variety of devices known in the art for administering medications to a subject can be included in the kits provided herein. Exemplary devices include, but are not limited to, a hypodermic needle, an intravenous needle, a catheter, a nebulizer, and an inhaler. Typically, the device for administering the compositions is compatible with the desired method of administration of the composition.

### 3. Administration of Cargo=Loaded MEVs and Routes of Administration

[0407] The cargo-loaded MEVs provided herein can be administered to a subject by any method known in the art for the administration of polypeptides, including for example systemic or local administration. For vaccination purposes, the MEVs can be administered orally or intramuscularly, or any other route whereby the MEVs traffic to the immune system.

[0408] In general, the cargo-loaded MEVs can be administered by routes, such as parenteral (e.g., routes, such as intradermal, intramuscular, intraperitoneal, intravenous, subcutaneous, and intracavity), topical, epidural, or mucosal (e.g., routes, such as topical, intranasal, oral, vaginally, vulvovaginal, esophageal, or esophageal, bronchial, rectal, and pulmonary). The cargo-loaded MEVs can be administered externally to a subject, at the site of the disease for exertion of local or transdermal action. Compositions containing the cargo-loaded MEVs can be administered, for example by infusion, inhalation, by bolus injection, or by absorption through epithelial or mucocutaneous linings (e.g., topical, oral, vaginal, rectal and intestinal mucosa). Compositions containing the cargo-loaded MEVs can be administered together with or sequentially with other biologically active agents. For example, the cargo-loaded MEVs are administered by infusion delivery, such as by infusion pump or syringe pump, and can be administered in combination with another therapeutic agent or as a monotherapy.

[0409] The method and/or route of administration can be altered to alleviate adverse side effects associated with administration provided herein. For example, if a patient experiences a mild or moderate (i.e., Grade 1 or 2) infusion reaction, the infusion rate can be reduced (e.g., reduced by 10%, 20%, 30%, 40%, 50%, 60%, 70%, 80%, 90% or more). If the patient experiences severe (i.e., Grade 3 or 4) infusion reactions, the infusion can be temporarily or permanently discontinued.

[0410] In some examples, if the subject experiences an adverse side effect, such as severe skin toxicity, for example severe acneiform rash, treatment adjustments can be made. For example, after the occurrence of an adverse side effect, administration can be delayed, such as for 1 to 2 weeks or until the adverse side effect improves. In some examples, after additional occurrences of an adverse side effect, the dosage can be reduced. A particular regimen and treatment protocol can be established by the skilled physician or other practitioner.

[0411] Appropriate methods for delivery, can be selected by one of skill in the art based on the properties of the dosage amount of the cargo-loaded MEVs or the pharmaceutical composition containing the cargo-loaded MEVs. Such properties include, but are not limited to, solubility, hygroscopicity, crystallization properties, melting point, density, viscosity, flow, stability and degradation profile.

### 4. Combination Therapies

[0412] The cargo-loaded MEVs provided herein can be administered before, after, or concomitantly with one or more other therapeutic regimens or agents. The skilled medical practitioner can determine empirically, or by considering the pharmacokinetics and modes of action of the agents, the appropriate dose or doses of each therapeutic regimen or agent, as well as the appropriate timings and methods of administration. The additional therapeutic regimens or agents can improve the efficacy or safety or other properties of the cargo-loaded MEVs. In some examples, the additional therapeutic regimens or agents can treat the same disease or a comorbidity. In some examples, the additional therapeutic regimens or agents can ameliorate, reduce or eliminate one or more side effects known in the art or described herein that are associated with administration of the cargo-loaded MEVs or the cargo.

[0413] For example, the cargo-loaded MEVs described herein can be administered with other immunomodulatory agents or treatments. The cargo-loaded MEVs can be administered with other anti-pathogen therapeutics and treatments. The cargo-loaded MEVs can be administered in combination with one or more other prophylactic or therapeutic agents, including but not limited to antibodies, cytotoxic agents, chemotherapeutic agents, cytokines, growth inhibitory agents, anti-hormonal agents, kinase inhibitors, anti-angiogenic agents, cardio-protectants, immunostimulatory agents, immunosuppressive agents, agents that promote proliferation of hematological cells, angiogenesis inhibitors, protein tyrosine kinase (PTK) inhibitors, FcTRIIb or other Fc receptor inhibitors, or other therapeutic agents.

[0414] The one or more additional agents can be administered simultaneously, sequentially or intermittently with the cargo-loaded MEVs. The agents can be co-administered, for example, as part of the same pharmaceutical composition or same method of delivery. In some examples, the agents can be co-administered at the same time as the cargo-loaded MEVs, but by a different means of delivery. The agents also can be administered at a different time than administration of the cargo-loaded MEVs, but close enough in time to have a combined prophylactic or therapeutic effect. In some examples, the one or more additional agents are administered subsequent to or prior to the administration of the cargo-loaded MEVs separated by a selected time period. In some examples, the time period is 1 day, 2 days, 3 days, 4 days, 5 days, 6 days, 1 week, 2 weeks, 3 weeks, 1 month, 2 months, or 3 months. In some examples, the one or more additional agents are administered multiple times and/or the cargo-loaded MEVs provided herein are administered multiple times.

### G. BIODISTRIBUTION OF MEVs FOLLOWING ADMINISTRATION VIA VARIOUS ROUTES

### 1. Biodistribution of Mammalian EVs

[0415] Pharmacokinetics and biodistribution in organs and tissues of mammalian EVs have been extensively studied for their pharmacokinetics and distribution in organs and tissues (Vader et al. (2016) Advanced drug delivery reviews 106(PtA):148-156, doi.org/10.1016/j.addr.2016.02.006; Morishita et al. (2017) Journal of pharmaceutical sciences 106(9):2265-2269, hdoi.org/10.1016/j.xphs.2017.02.030). Treatments with mammalian cell-derived EVs are generally based on intravenous or intraperitoneal routes of administration. Primary target organs upon systemic administration of mammalian EVs are the liver, spleen and lungs. A comprehensive study (see, Wiklander et al. (2015) J. Extracellular Vesicles 4:26316) of the tissue distribution of fluorescently-labelled mammalian Evs from various cell sources demonstrated that 24 hours after intravenous (i.v.) injection in mice, the highest fluorescence signal was in the liver, followed by spleen, gastrointestinal tract and lungs. Furthermore, cell source, EV dose, and route of administration was shown to affect EV distribution; for example, injection of higher EV doses resulted in relatively lower liver accumulation compared to lower doses, possibly caused by saturation of the mononuclear phagocyte system (MPS). Comparison between intraperitoneal (i.p.), subcutaneous (s.c.) and i.v. administrations showed that intraperitoneal and subcutaneous doses resulted in reduced EV accumulation in liver and spleen and enhanced pancreas and gastrointestinal tract accumulation compared to i.v. injections. Systemically administered Evs are reported to be rapidly taken up by the mononuclear phagocyte system (MPS), particularly in the liver and spleen. The mechanism of clearance resembles that described for synthetic nanoparticles, such as liposomes (Van der Meel et al. (2014) J. Control. Release 195:72-85). The majority of splenic accumulation is caused by EV storage in the spleen rather than uptake by the spleen (Lai C.P. et al. (2014) ACS Nano 8:483-494). Biodistribution of mammalian EVs following other routes of administration also has been investigated. For targeting of the central nervous system, intranasal administration of curcumin-loaded mammalian EVs resulted in EV localization in the brain. Drug levels peaked at 1 hour after administration, and a significant amount detected after 12 hours with no toxic effects observed (Zhuang et al. (2011) Mol. Ther. 19:1769-1779).

[0416] In general, mammalian EVs are not employed for oral delivery because of their low stability at various pH and temperatures, rapid degradation of biomolecules in the digestive tract, and the limitations of industrial scale production for oral dosing (Cheng et al. (2019) Protein Cell 10:295-299). The only exception so far are bovine milk-derived EVs, which upon oral delivery to mice have shown a pattern of distribution that, analyzed with whole-body in vivo imaging system (IVIS), included rapid accumulation in the intestine, where the EVs were detectable after 2 and 6 hours, followed by fluorescence signal observed in liver, spleen, lungs, kidney, heart, and the gastrointestinal tract at 24 hours. After 48 hours, the fluorescence signal subsided within most of the organs indicating the clearance of nanovesicles from the system (Samuel et al. (2021) Nat Commun 12:3950, doi.org/10.1038/s41467-021-24273-8). Thus, mammalian EVs (derived from sources other than milk) cannot be absorbed by the intestinal tract and from the intestines to become bioavailable in target organs (Zhong et al. (2021) Biomaterials. 277:121126. Doi: 10.1016/j.biomaterials.2021.121126).

[0417] Treatments with mammalian cell-derived EVs generally employ intravenous or intraperitoneal routes of administration for systemic administration where the target organs are the liver, spleen and lungs. As noted, most mammalian EVs have not been employed for oral delivery due to their low stability at various pH and temperatures, rapid degradation of biomolecules in the digestive tract, and the limitations of industrial scale production for oral dosing (Cheng et al. (2019) Protein Cell 10(4):295-299). The only exception are bovine milk-derived EVs, which upon oral delivery to mice have shown a pattern of distribution that, analyzed with whole-body in vivo imaging system (IVIS), include rapid accumulation in the intestine, where the EVs were detectable after 2 and 6 hours, followed by fluorescence signal observed in liver, spleen, lungs, kidney, heart, and the gastrointestinal tract at 24-hour time point. After 48 hours, the fluorescence signal subsided within most of the organs indicating the clearance of nanovesicles from the system.

[0418] As described herein, and in copending commonly owned applications (see, PCT/EP2023/051650), MEVs have different properties from mammalian EVs. For example, they are stable in the harsh environment of the gastrointestinal tract compared to mammalian cell-derived EVs. Thus, the microalgae EVs, as described herein, are particularly suitable for oral administration and drug delivery, as well as other routes of delivery as described herein.

### 2. Microalgae EVs Biodistribution

[0419] MEVs, including those provided herein from Chlorella, have properties that are distinct from mammalian EVs, including bovine milk EVs (see, commonly owned PCT/EP2023/051650). For example, a striking difference, as described below, is that the MEVs can be administered orally, and that the primary target is the spleen, particularly the white pulp of the spleen (white spleen). This renders the MEVs of use as vaccines and for delivery of immunomodulatory cargo.

[0420] The MEVs provided herein can deliver a variety of bioactive molecules, such as RNAs, such as mRNA, siRNA, and miRNA; proteins; peptides; and small molecules, which can be exogenously or endogenously loaded. These include products such as tissue-specific products and/or disease specific products. Each route can be used to target particular organs and treat particular diseases. The MEVs can be formulated for administration by each route. Thus, provided are compositions containing MEVs that are for treating particular disease and for particular routes of administration. For immune modulation and vaccination, the MEVs are delivered by routes, such as oral and IM and mucosally, including by inhalation into the lungs, nose, and intestinal mucosa, that result in delivery of the MEV cargo to organs and tissue of the immune system.

[0421] The route of administration determines the fate of the MEVs, and that the ultimate location of the MEVs is a function of the route of administration. Targets and endpoints of the MEVs include, but are not limited to, the liver, spleen, lungs, the intestines, and brain. Routes of administration include, but are not limited to, respiratory (nose, lungs), oral (digestive), intravenous, central nervous system (CNS), and topical. The selection of route depends upon the ultimate target and the payload. It is shown herein that intranasal administration goes to the lungs, intratracheal via a spray goes to the lung(s), intravenous accumulates in the spleen and liver, oral (per Os) goes to the digestive tract and spleen. In contrast, mammalian EVs cannot be taken orally. As described herein, routes for delivery of cargo to the immune system include oral and IM.

[0422] MEVs are readily internalized by human cells. For example, in vitro, when administered to cells in culture, such as A549 cells, at a ratio of MEV/cell of 1000/1, 93% of the cells internalized the MEVs, and this occurred within 24 to 48 hours after contacting the cells with the MEVs.

[0423] DIR-labeled MEVs were administered to mice via four routes: intranasal (IN), intratracheal (IT), intravenous (IV), and oral, and, by full-body imaging as a function of time, the fate of the MEVs was visualized for 3 days, followed by sacrificing the mice to harvest organs for study. As shown in the examples, intravenous administration targets the liver at about 4-12 hours following administration, and the spleen, appearing to be in the red pulp of the spleen (red spleen), at 10-30 hours. Oral administration targets the intestine and spleen. It is shown herein that the MEVs are orally available; they resist passage through the stomach, and reach the intestine at 0.5 hour to 4 hours, and then the spleen at 0.5 hour to 10 hours. Of interest is the route to the spleen; there are two possible routes to the spleen, via the blood (to red spleen), and via lymphocytes (to white spleen), which has implications for targeting and delivering cargo to the immune system, accumulating from 4 hours to 28 hours. This can be effected by internalization by lymphocytes that are activated and end up in the spleen where they multiply, and/or by lymphocytes that phagocytose the MEVs, which are not activated, and go to the white pulp of the spleen (white spleen) from where they are disseminated through the immune system.

a. Oral Administration

[0424] Orally ingested MEVs go into the intestine, then end up in the spleen, likely the white spleen. The spleen is responsible for initiating immune reactions to blood-borne antigens, and for filtering foreign material and old or damaged red blood cells from the blood. These functions are performed by two different compartments in the spleen: the white spleen, and red spleen. The two compartments are vastly different in structure, vascular organization, and cellular composition (see, e.g., Cesta (2006) Toxicologic Pathology 34:455-465 for a review of the structure, function and histology of the spleen).

[0425] White blood cells, which are plentiful in the intestine, migrate to the white spleen. When ingested orally the MEVs can be internalized by intestinal cells and, as discussed below, including by intestinal lymphocytes, which carry the MEVs to the spleen. This is in contrast to mammalian vesicles, which cannot be administered orally. Thus, MEVs provide a delivery vehicle for agents for which the immune system is a target, such as for example, immune-modulating cargo. As discussed above, the pathway to the white spleen can occur, for example, via activated lymphocytes and/or phagocytic lymphocytes. Lymphocytes can phagocytose the MEVs, and are homed to the spleen. The MEVs, unlike mammalian EVs, provide a way to orally deliver small molecule drugs and proteins and other therapeutics, such as nucleic acid therapeutics, that cannot be administered orally. In particular, orally administered MEVs provide a route for treatment of diseases, such as cancers and inflammatory diseases, in which the immune system is involved or in which the treatment can be effected by targeting the immune system. Such diseases include, but are not limited to, infectious disease, autoimmune diseases, cancers, and prevention of organ transplant rejection. These diseases are treated by suppressing or augmenting the activity of immune cells.

### 1) Components of the Lymphatic System

[0426] The lymphatic system includes lymph, lymphatic vessels and lymphatic organs (see, discussion in Zgair et al., (2016) Targeting Immunomodulatory Agents to the Gut-Associated Lymphoid Tissue. In: Constantinescu C., Arsenescu R., Arsenescu V. (eds) Neuro-Immuno-Gastroenterology. Springer, Chain. (doi.org/10.1007/978-3-319-28609-9_14) and summarized below).

### Lymph

[0427] Lymph is a generally clear and colorless fluid that drains from the interstitium, and contains recovered fluids and plasma proteins, and also can contain lipids, immune cells, hormones, bacteria, viruses, cellular debris, and cancer cells.

### Lymphatic Vessels

[0428] The lymphatic system is the body's second circulatory system. The lymphatic system is a unidirectional, blind-ended and thin-walled system of capillary vessels where lymph is driven. Lymphatic capillaries drain in the afferent collecting vessels, which then pass through one or more gatherings of lymph nodes. Lymph fluid then passes through the efferent collecting vessels, larger trunks and then the lymphatic duct, which drain lymph to the systemic circulation. Primary lymphatic organs include the thymus gland and bone marrow, which produce mature lymphocytes, which identify and respond to antigens; secondary lymphatic organs include lymph nodes, spleen and mucosa-associated lymph tissues (MALTs). Within the secondary lymphatic organs, lymphocytes initiate immune responses. MALTs are distributed throughout mucous membranes and provide a defensive mechanism against a wide variety of inhaled or ingested antigens. MALTs are categorized according to their anatomical location as: bronchus-associated lymphoid tissue (BALT), nasal-associated lymphoid tissue (NALT), salivary gland duct-associated lymphoid tissue (DALT), conjunctiva-associated lymphoid tissue (CALT), lacrimal duct-associated lymphoid tissue (LDALT) and gut-associated lymphoid tissue (GALT).

### Gut-Associated Lymphoid Tissue (GALT)

[0429] GALT is composed of effector and immune induction sites. Effector sites include lymphocytes distributed throughout the lamina propria (LP) and intestinal epithelium; induction sites involve tissues, such as such as mesenteric lymph nodes (MLN), PP and smaller isolated lymphoid follicles (ILF). Mesenteric lymph nodes (MLN), which occur in the base of the mesentery, are the largest gatherings of lymph nodes in the body. The structure of MLN is divided into two regions: the medulla and cortex. The cortex primarily is composed of T-cell areas and B-cell follicles. Within the T-cell area, circulating lymphocytes enter the lymph node, and dendritic cells (DC) present antigens to T-cells. Lymph (containing cells, antigens and chylomicrons) is collected from the intestinal mucosa and reaches the MLN via the afferent lymphatics. Lymph fluid subsequently leaves the MLN through efferent lymphatics to reach the thoracic duct that drains to the blood.

[0430] Peyer's patches (PP) are a collection of lymphoid nodules distributed in the mucosa and submucosa of the intestine. They contain a sub-epithelial dome area and B-cell follicles dispersed in a T-cell area. A single layer of epithelial cells, called follicle-associated epithelium (FAE), separates lymphoid areas of PP from the intestinal lumen. FAE is permeated by specialized enterocytes called microfold (M) cells. These cells are a gate for the transport of luminal antigens to PP.

[0431] Isolated lymphoid follicles (ILF) are a combination of lymphoid cells in the intestinal LP. ILF are composed of germinal centers covered by FAE containing M-cells. ILF is a complementary system to PP for the induction of intestinal immunity.

[0432] GALT is the largest lymphatic organ in the human body and contains more than half of the body's lymphocytes. GALT is exposed to more antigens in the form of commensal bacteria and alimentary antigens, in addition to those from invasive pathogens, than any other part of the body. Intestinal lymphatic transport avoids hepatic first-pass metabolic loss by diverting the absorption of lipophilic drugs towards intestinal lymphatics rather than the portal vein. The intestinal immune system must distinguish antigens that require a protective immune response and develop a state of immune hypo-responsiveness (oral tolerance) for harmless antigens. This is effected by sampling of luminal antigens in the intestinal epithelium by DC. Antigens can cross the epithelium through M-cells, which are specialized epithelial cells of the follicle-associated epithelium of the GI tract. The antigens interact with DC in the underlying sub-epithelial dome region. Antigens are presented to local T-cells in PP by DC.

[0433] DC also migrate to the draining MLN where they present antigens to local lymphocytes. Alternative pathways for antigen transport across the intestinal epithelial cells involve receptor-mediated transport, and direct sampling from the lumen by DC projections. Antigen-loaded DC then migrate to the MLN through afferent lymphatics where they present antigens to T-cells. Subsequently, differentiated lymphocytes migrate from MLN through the thoracic duct and blood stream and eventually accumulate in the mucosa for an appropriate immune response.

### 2) Targeting GALT

[0434] Orally administered MEVs can target gut-associated lymphoid tissue (GALT).

[0435] Upon oral administration the MEVs pass through the epithelial layer of the lumen into the GALT, where they are internalized by macrophages and dendritic cells. Antigen presenting cells (APCs), carrying the MEVs enter the bloodstream, where they are protected from hepatic first-pass metabolic loss since they are effectively invisible inside the APCs. In the APCs, the MEVs traffic from the liver to the red and white pulp of the spleen. By reaching the spleen, the MEVs can deliver vaccines and immunomodulatory therapeutics. This can be effected by oral administration. (Also as shown herein, administration to cells of the immune system can be effected by inhalation into the lungs and via intramuscular administration.)

[0436] Thus, GALT is a target (effective compartment) and/or a route through which MEVs and their therapeutic agent cargo can be used to deliver cargo to organs, tissues, and/or systemic circulation; the MEVs can be used to deliver vaccines and immunomodulatory cargo via entry through the GALT, into APCs, and into the spleen. GALT is an advantageous target for various pharmacological agents such as, for example, immunomodulators, chemotherapeutic agents, and anti-infective agents. The lymphatic system is a main pathway for intestinal and other tumor metastases; therefore, targeting cytotoxic drugs to the intestinal lymphatics can be used to treat tumor metastases. GALT is a delivery target for antiviral agents, as some viruses, such as, for example, human immunodeficiency virus (HIV), morbillivirus, canine distemper virus, severe acute respiratory syndrome (SARS)-associated coronaviruses, hepatitis B and hepatitis C, spread and develop within the lymphatic system. The MEVs, including the Chlorella MEVs exemplified herein, can be used to target immune cells upon oral delivery. As described above, the microalgae MEVs show a distinct pattern of biodistribution when administered orally. This pattern includes initial intestine accumulation followed by targeting the spleen; whereas, as described and shown herein, they are detectable up to 24 hours.

[0437] Since the microalgae MEVs are delivered to the spleen, the mechanism of this delivery can be based on cells of the immune system. Immune cells are abundant in the single-cell layer of intestinal epithelium and underlying lamina propria of the gut-associated lymphoid tissue (GALT). The immune cells include, T cells, plasma cells, mast cells, dendritic cells, and macrophages (Luongo et al. (2009) Current perspectives. International Reviews of Immunology 28(6):446-464, doi.org/10.3109/08830180903236486). Macrophages, dendritic cells, neutrophils, and also B cells perform phagocytosis. The immune cells in the gut, thus, can phagocytose the MEVs to deliver them to the spleen. After phagocytosis, the fate of the MEV cargo can depend upon the type of cargo. For example, macrophage and dendritic cells participate in antigen presentation, and present proteins delivered in the MEVS, or the products in the MEVs can be secreted, or the products, such RNA, can be translated.

[0438] Immune cells present in the intestinal epithelium and lamina propria of the intestine migrate to the spleen and back to the intestine. This homing to the spleen can be involved in MEV transfer from the gut to secondary lymphatic organs, especially to the spleen. T cells exhibit a specific lymphocyte recirculation pathway (Mackay et al. (1990) J Exp Med 171:801-17) that can be part of MEV trafficking to the spleen upon oral delivery. Therefore, cells of the immune system are targeted by orally-administered MEVs, and this phenomenon contributes to MEV localization in the spleen within hours post-administration.

[0439] Upon oral administration, the MEVs go to the intestine and then migrate to the spleen. The route to the spleen can be via absorption into the blood and/or by internalization by immune cells in the intestine. The blood route is an unlikely route, because the MEVs then would appear in the liver as shown for intravenous administration. When MEVs are administered intravenously they primarily reach the liver (massively) and to a much lesser extent the spleen. It is shown herein that clearance of the MEVs from the spleen follows different kinetics depending upon their origin (oral or IV). The migration to the spleen following oral administration therefore uses a different a pathway from the MEVs administered intravenously.

[0440] When MEVs are administered by mouth, they reach the spleen after having passed through the intestine. These results indicate that the MEVs are located in “different compartments” inside the spleen, depending on the route of arrival: either from the intestine or from the blood. As discussed, upon oral administration, the likely route is that the MEVs in the intestine are internalized by lymphocytes present in the GALT, and that the subsequent migration of the MEVs from the intestine/GALT to the spleen occurs because the MEVs are transported by the lymphocytes. Coming from the intestine/GALT, the MEVs end up in the white spleen compartment. Thus, the MEVs provide a way to deliver cargo to different organs from mammalian EVs, which cannot be administered orally.

### 3. Diseases and Conditions Treated by MEVs

[0441] Based upon the targeted organs, a variety of diseases and disorders can be treated by MEVs. The MEVs can be loaded or produced to contain therapeutic agents for treating these diseases and conditions. The appropriate route of administration for the targeted organ and disease is selected. For example, for targeting the spleen and intestines, oral administration is selected; and for targeting the lungs, inhalation or nasal administration is selected. Based on the biodistribution and pharmacokinetic data the following organs can be targeted to treat diseases exemplified as follows.
[0442] liver: cancer, cancer metastases, metabolic syndrome, genetic disorders (delivery of gene therapy), alpha-anti-trypsin (AAT) deficiency and other inborn errors of metabolism, hemophilia, hypercholesterolemia, liver inflammation, steatohepatitis, and other diseases and disorders that can be treated by delivery of a therapeutic to the liver;
[0443] spleen: diseases treated by immune modulation, including cancers, and immune cell disorders, and cancer, and other diseases that can be treated by administration to the spleen, particularly by immune cells that occur in or traffic to the white spleen;
[0444] intestine: diseases and disorders treated or prevented by vaccines, intestinal infections, microbiota modulation, Crohn's disease, cancer, ulcers, diseases treated by orally administered drugs, such as small molecules and proteins, and other such diseases, disorders, and conditions; and
[0445] lungs: infectious diseases, particularly respiratory diseases, chronic obstructive pulmonary disease (COPD), pulmonary hypertension, asthma, other inflammatory lung diseases, cystic fibrosis, ATT-deficiency, lung disease, cancer, cancer metastases, and other such diseases and disorders.

### H. THE IMMUNE SYSTEM AND MEVs FOR USE AS VACCINES AND FOR DELIVERY OF IMMUNOMODULATORS

[0446] The MEVS can be used as vaccines where the cargo comprises an antigen, as a protein, or nucleic acid, for inducing an immune response. The vaccines can be administered by any route that delivers cargo to the immune system or cells involved in a disease, disorder, or condition that can be targeted for immunization or treatment. Routes of administration of vaccines include, but are not limited to, oral, intramuscular, and local administration, including mucosal administration, such as inhalation to the lungs and nasal tract.

### 1. Immune System and Vaccines

[0447] The immune systems of mammals have evolved to defend and eliminate pathogens and other foreign invaders or cells in the body. Those of skill in the art are familiar with the immune system and components thereof. The mammalian immune system has two major branches, innate and adaptive immunity (see, e.g., FIG. 16, which includes components of each branch). The innate immune system recognizes pathogen-associated molecular patterns through a limited number of germ-line encoded pathogen recognition receptors. The innate immune response is relatively nonspecific in recognizing pathogens and does not induce immune memory. The adaptive immune system employs a large repertoire of rearranged receptors, adaptive immunity plays a major role in eliminating pathogens in the later phase of infection as well as in generating immunological memory.

[0448] Acquired immunity develops by clonal selection from a vast repertoire of lymphocytes bearing antigen-specific receptors that are pre-generated via a mechanism generally known as gene rearrangement during an early developmental stage. This fundamental characteristic of the host immune system to generate immunological memory provides a rationale for vaccination as the most effective measure in preventing infectious diseases or reducing the risk of acquiring an infectious disease or the severity of such disease. Induction of long-term protective immunity is a goal of developing successful and safe vaccines.

### 2. Vaccines—Oral, Intramuscular, and Local Administration, Including Mucosal Administration, Such as Inhalation to the Lungs and Nasal Tract

[0449] The MEVs, which deliver cargo to particular organs, cells and tissues, can be used as vaccines to deliver proteins, nucleic acid, or other therapeutics for the treatment and previous immunotherapies or vaccines of diseases, disorders, and conditions. For use as vaccines routes of administration include oral administration, and intramuscular administration (IM) for trafficking via routes discussed above. Vaccines can be administered locally and can be administered mucosally. Routes also include inhalation into the lungs and/or nose.

a. MEV-Based Oral Vaccines

[0450] The oral route of vaccine administration provides the advantage of stimulating mucosal immunity (as discussed herein). While mucosal epithelium covers the largest surface area in the body, it also constitutes the first line of defense against external pathogens. Physicochemical and biological barriers are present on these mucosal surfaces, both to regulate nutrient uptake and provide defensive responses. Vaccine-mediated stimulation of mucosal immunity can improve protective efficacy and enhance disease prevention. Oral immunization can also improve vaccine efficacy by increasing accessibility and coverage. In fact, vaccine distribution represents one of the main limiting factors, particularly in developing countries. One of the key advantages of oral vaccines compared to traditional injections it their capacity to facilitate distribution with easy administration, including self-administration of oral formulations. Self-administration is an ideal method to achieve widespread and rapid distribution of vaccines as it minimizes the need for trained healthcare personnel and visits to healthcare facilities. This enhances the use of vaccines, reduces the cost of vaccination programs, and eliminates occupational hazard of needle injuries for health-care workers. Oral vaccines provide regulatory benefits and more cost-effective production as there are different purity requirements between oral and injected formulations. Traditional injectable vaccines generate considerable amount of biohazardous waste and the cost of its disposal.

[0451] Oral delivery is the most desirable and patient-accepted route of administration, with more than 60% of commercialized small molecule drug products using the oral route. Despite this, only a small fraction of vaccines approved so far are orally-available due to the inherent obstacles presented by the gastrointestinal system. The induction of a robust protective immune response by oral immunization requires: (i) successful delivery of the intact and active antigen to the intestine, (ii) transport across the mucosal barrier, and (iii) subsequent activation of antigen-presenting cells. Each of those steps can be hindered by multiple physicochemical and biological barriers in the gastrointestinal tract. Labile antigens undergo degradation in the harsh environment of the stomach and by the digestive enzymes. Intestinal epithelium and its mucus-secreting layers provide biological barriers that protect the organism from pathogen invasion. Furthermore, the time window for vaccine absorption is narrow, as the residence time in the small intestine, where the majority of absorption occurs, is about 3-4 hours. The oral delivery route requires administering adequate doses of the vaccine to generate immunity instead of tolerance. Since the gastrointestinal tract is constantly exposed to a variety of pathogens, the vaccine formulation must trigger appropriate danger signals to sufficiently stimulate the immune system and shift the immune balance of the gut from immune tolerance to protective immune response.

[0452] It is shown herein that MEVs provide a vehicle for oral delivery of vaccines and other cargo to the immune system via oral delivery. Results herein evidence that adjuvants are not necessarily required to result in a robust immune response when delivery (oral or via other routes) is effected via MEVs. Data herein also show that the MEVs are not immunogenic (see, e.g., FIGS. 14A-14C), and thus, can be used a plurality of times for immunization.

b. MEV-Mediated Immunization Upon Oral Delivery

[0453] As described and exemplified herein, the MEVs show a particular pattern (intestine-GALT-mesenteric lymphoid nodes-spleen) of biodistribution when administered orally, which includes initial intestine accumulation followed by targeting the spleen, where they are detectable up to 24 hours (see Example 5 below). The MEVs specifically are delivered to the spleen by immune cell-mediated transport of the MEVs. In the course of gastrointestinal tract migration, the MEVs cross the barrier of intestinal epithelium and become available to meet with immune cells of the gut-associated lymphoid tissue (GALT) and mesenteric lymphoid nodes—the largest mass of lymphoid tissue in the body. This tissue includes rich cellular populations of T cells, plasma cells, mast cells, dendritic cells (DC) and macrophages. The immune cells present in the GALT are also known to constantly circulate between the intestine and the spleen. The MEVs are internalized by the GALT cells and can be transferred from the gut to other secondary lymphoid organs (SLO), including mesenteric lymph nodes and the spleen.

[0454] During an immune response against a foreign antigen, a number of immune cells are competent to interact with the antigen. This includes naïve B cells and other cells within the lymphoid tissue microenvironment (such as CD4⁺ T cells, macrophages and dendritic cells). Antigen-specific naïve B cells then undergo one of two fates: some of them rapidly differentiate into short-lived plasma cells, which provide a first wave of defense against the invading pathogen, while others migrate to the B-cell follicles of SLO, where transient structures called germinal centers (GCs) are formed. This process is triggered by follicular helper T cells (T_{FH}) interacting with their cognate follicular B cells. Upon contact with the T_{FH} cells, the B cells obtain T cell help required for B cell activation and proliferation. Within the formed GC, B cells undergo somatic hypermutation, class switch recombination and selection of high-affinity variants. Ultimately, they differentiate either into long-lived plasma cells capable of producing high-affinity antibodies against foreign antigen, or germinal center-dependent memory B cells capable of quick immune re-activation in the future if ever the same antigen is re-encountered. Memory B cells can be produced not only during the T cell regulated immune response, but also from conventional marginal B2 lymphocytes, in the marginal zone of spleen white pulp.

[0455] Cell-mediated immunity, involving CD4⁺ and CD8⁺ T cells, plays a major role in defense against intracellular and extracellular bacteria, as well as immunity against tumors. Naïve T cells leave the thymus, enter the circulation, and then traffic preferentially through SLO, where they screen antigen-presenting cells in search of their cognate peptide-MHC complex. The antigens are presented by migratory dendritic cells, which migrate from the periphery into lymph nodes and the spleen. Once the specific encounter occurs, naïve T cells are primed by the dendritic cells and differentiate into activated effector/memory T cells. Although T cell activation occurs mainly in the lymph nodes, some antigen-specific T cells are primed in the spleen; those T cells are transcriptionally distinct and have enhanced ability to differentiate into long-lived memory cells compared with lymph node-primed counterparts.

[0456] The MEV vaccines as described and provided herein, elicit potent immune and serological memory. Long-term cell-mediated immunity depends on spleen-primed T cells, which differentiate into long-lived memory cells, thereby contributing to vaccine efficacy. On the other hand, generation of sustained serological memory is dependent on the GC reactions occurring in the secondary lymphoid organs. This results from MEV-mediated targeting of secondary lymphoid organs upon oral vaccine administration. This primarily includes the GALT (Peyer's patches), followed by transport (by macrophages and dendritic cells (DC)) of MEVs into lymph nodes and the spleen. MEV-assisted vaccine delivery results in enhanced T cell priming in the spleen, T_{FH} cell activation, GC formation, affinity-matured B cell generation and improved production of memory T cells, long-lived plasma cells and durable memory B cells. As described herein, and understood by those skilled in the art, the vaccine delivery system can be further engineered with protein and non-protein immunomodulatory agents either loaded into the MEV lumen or associated with the MEV membrane, and/or for combination therapy as separate compositions or co-formulations.

c. MEV-Mediated Immunization and Mucosal Immunity

[0457] Traditionally, intramuscularly or intradermally administered vaccines generate strong IgM and IgG predominant responses. In particular, the intramuscular route induces an immune response in the axillary draining lymph node that is biased towards class switch to IgG rather than to IgA. As shown herein, however, the response to IM administration includes an IgA response. In evaluation of the immune response to some infections, e.g., influenza, IgA together with IgG are more important in protection against secondary infection; whereas IgG and IgM predominate in the primary immune response. IgA is the predominant immunoglobulin expressed in the respiratory tract, cornea, and gastrointestinal tract mucosal surfaces, and IgA responses with neutralizing capability are described for several viral pathogens. Neutralizing antibody titers are the best correlates of protection in most vaccines, and memory responses are responsible for protection from re-infection and are essential for effective vaccination.

[0458] The results described in the Examples herein include analysis of the antigen-specific antibody response after intramuscular or oral administration of MEV-based vaccine formulations. As can be seen in FIGS. 14A-14C, the antigen-specific antibodies produced include immunoglobulin A (IgA)-class antibodies that are specific to the MEV cargo. This indicates that MEV-based formulations elicit protective humoral responses that comprise serum and mucosal IgA, thereby generating vaccine-induced IgA-producing memory B-cells to provide systemic and mucosal responses that protect from reinfection.

[0459] As described herein, the MEVs can be delivered to the mucosa, which include by oral administration, by inhalation into the lungs and/or nose, ocularly, and via urogenital tissues, and other routes by which the MEVs contact mucosal tissues.

[0460] The mucosal immune system is comprised of anatomically remote and physiologically independent compartments that protect ocular, nasopharyngeal, respiratory, oral, gastrointestinal, and genitourinary mucosae. Collectively, the mucosal surface exceeds 300 m². In many infections, the mucosa, such as the nasal cavity for respiratory pathogens, is a primary checkpoint for the systemic invasion. Numerous pathogens, including, for example, S. aureus, S. pneumoniae, and viruses, such as flu viruses, and corona viruses, including SARS-CoV-2, can adhere/colonize the mucosal lining to trigger an infection. Secretory IgA (sIgA), discussed further below, serves as the first line of immune defense against foreign pathogens. IgA is the predominant immunoglobulin expressed in the respiratory tract, cornea, and gastrointestinal tract mucosal surfaces, and IgA responses with neutralizing capability are described for several viral pathogens. sIgA facilitates clearance of pathogenic microbes by intercepting their access to epithelial receptors and mucus entrapment through immune exclusion. The significance of IgA-mediated mucosal immunity provides a mechanism to mount protection against a number of pathogens within the respiratory, gastrointestinal and genitourinary tracts.

[0461] The challenge, however, remains that when a systemic immune response is induced, it is not necessarily communicated to the mucosal IgA system. Traditionally, intramuscularly or intradermally administered vaccines generate strong systemic IgM and IgG predominant responses. The intramuscular route induces an immune response in the axillary draining lymph node that is biased towards class switch to IgG rather than IgA. In contrast, IgA-based antibody response in body fluids (e.g., the serum, saliva, and bronchoalveolar lavage fluid) is required for protective immunity against many pathogens, and it is associated with expansion of IgA plasmablasts with mucosal homing characteristics.

[0462] Results described in the Examples herein include analysis of the antigen-specific antibody response after intramuscular or oral administration of MEV-based vaccine formulations. As can be seen in FIGS. 14A-14C, the antigen-specific antibodies produced were shown to include immunoglobulin A (IgA)-class antibodies that are specific to the MEV cargo. MEV-based formulations, thus, can elicit a protective humoral response that comprises serum and mucosal IgA, and also generates vaccine-induced IgA-producing memory B-cells that provide systemic and mucosal responses needed to protect from reinfection. As recognized by those skilled in the art, neutralizing antibody titers are correlated with vaccine protection, while immune memory is essential for effective vaccination.

d. MEV-Mediated Immunization Upon Intramuscular Delivery

[0463] Efficient or effective immunization relies on concurrent delivery of two signals to the immune system: a molecular pattern (antigen) to be specifically recognized and a danger signal (immunostimulation) to activate the response. The immune system identifies threats to initiate an immune response based on the presence of non-self-molecular patterns (including pathogens) and/or alarm signals from cells under stress. Therefore, classical approaches to vaccination are based on adjuvants used to accelerate, prolong, or enhance antigen-specific immune responses when used in combination with specific vaccine antigens. The results described in the Examples herein include analysis of the immune response after intramuscular administration of classical and MEV-based vaccine formulations. Direct comparison between adjuvant-assisted and MEV-mediated intramuscular immunization demonstrates a similar profile of the immune response. The results indicate that MEVs deliver the effective immunostimulatory signal equivalent to a classically used adjuvant.

e. Adjuvants

[0464] Adjuvants help antigen to elicit an early, high and long-lasting immune response with less antigen, thus saving on vaccine production costs. In recent years, adjuvants received much attention because of the development of purified, subunit and synthetic vaccines which are poor immunogens and require adjuvants to evoke the immune response. With the use of adjuvants immune response can be selectively modulated to major histocompatibility complex (MHC) class I or MHC class II and Th1 or Th2 type, which is very important for protection against diseases caused by intracellular pathogens such as viruses, parasites and bacteria (Mycobacterium). A number of problems are encountered in the development and use of adjuvants for human vaccines. An issue with the use of adjuvants for human vaccines, particularly routine childhood vaccines, is the toxicity and adverse side-effects of most of the adjuvant formulations. Adjuvants for human vaccination often balance a requirement for adjuvanticity and an acceptable low level of side-effects. Other problems with the development of adjuvants include restricted adjuvanticity of certain formulations to a few antigens, use of aluminum adjuvants as reference adjuvant preparations under suboptimal conditions, non-availability of reliable animal models, use of non-standard assays and biological differences between animal models and humans leading to the failure of promising formulations to show adjuvanticity in clinical trials. The most common adjuvants for human use today are still aluminum hydroxide and aluminum phosphate, although calcium phosphate and oil emulsions also have some use in human vaccinations.

[0465] Adjuvants can be classified based on their mechanisms of action, dividing them into two main categories: delivery systems (particulate) and immune potentiators. A further class of adjuvants comprises mucosal adjuvants. In delivery system adjuvants, antigens are associated with an adjuvant that works especially as an antigen carrier. They induce a local proinflammatory response by activating the innate immune system, leading to the recruitment of immune cells to the site of injection. The antigen-adjuvant complex activates pattern-recognition receptor (PRR) pathways by acting as pathogen-associated molecular patterns (PAMPs). This causes the activation of innate immune cells with the production of cytokines and chemokines. The same pathway is directly activated by immune potentiators. FIG. 16 depicts the immune response to immunization with an adjuvant plus and antigen. MEVs plus antigen follow a similar route, except that MEVs contain the antigen (or nucleic acid encoding the antigen) as cargo inside the MEV. The antigen can be expressed in the MEV; it can be expressed on the surface of the MEV, or other delivered into the host cell as a protein. MEVs provide delivery systems. TLRs can recognize exogenous ligands (PAMPS) and endogenous ligands (DAMPS).

f. Isotype Switching

[0466] Immunoglobulin class switching, also known as isotype switching, isotypic commutation or class-switch recombination (CSR), is a biological mechanism that changes a B cell's production of immunoglobulin from one type to another, such as from the isotype IgM to the isotype IgG. During this process, the constant-region portion of the antibody heavy chain is changed, but the variable region of the heavy chain stays the same. Since the variable region does not change, class switching does not affect antigen specificity. Instead, the antibody retains affinity for the same antigens, but can interact with different effector molecules. Isotype switching confers functional diversity to the immune response, and the generation of memory B cells providing long-lasting immunity to reinfections.

[0467] IgA class switching is the process whereby B cells acquire the expression of IgA, the most abundant antibody isotype in mucosal secretions. In general, for example, intramuscularly or intradermally administered vaccines generate strong IgM and IgG predominant responses, which provide strong protection against lower respiratory tract disease. In influenza, for example, IgA together with IgG is more important in protection against secondary infection; IgG and IgM predominate in the primary immune response. IgA antibodies primarily are involved in the immune response at the level of the mucosa. IgA is the primary immunoglobulin found in mucous secretions, including tears, saliva, sweat, colostrum and secretions from the genitourinary tract, gastrointestinal tract, prostate, and respiratory epithelium.

[0468] As shown herein, the responses, following IM and oral administration show isotype switching; IgG and IgA antibodies are observed (see, FIGS. 14A-14C). The results also showed that there was an absence of ‘neutralization’ against the MEVs, or the appearance of a ‘neutralizing’ immune response against the MEVs themselves, upon repeat administration. This allows for redosing (repeat administration of the MEVs). Eight (8) repeat administrations of the MEV over 60 days were done, no antibody response against the MEVs was observed. A cellular immune response involving T memory cells following IM and oral administration was generated. The T-cell response (involving memory cells) was antigen specific.

[0469] Results shown herein demonstrate generation of an ‘antigen-specific’ immune response following oral administration of the antigen-loaded MEVs. The results show the phenomenon known as ‘isotype switching’ Particularly, with the antigen-loaded MEVs, the isotype switching primarily was from IgG to IgA. For vaccines the humoral ‘antigen-specific’ immune response involving or including IgA antibodies, following IM (intramuscular) administration; and, even more, the generation of a humoral ‘antigen-specific’ immune response involving mainly IgA antibodies, following oral administration is advantageous for vaccines, particularly for mucosally administered vaccines.

[0470] Results of T-cell responses following IM administration are shown in FIGS. 18-26. FIGS. 18-20 show CD44/CD62L analysis. FIG. 18 shows how gating of cell subsets was effected: these include CD4+ and CD4−, CD8+ and CD8−, CD44+ and CD44− and CD62L+ and CD62L−. CD44+/CD62L− cells are indicative of T Effector Memory Cells (TEM) and CD44+/CD62L+ cells and indicative of T Central Memory Cells (TCM). The results show that in CD4+ and CD8+ cells recovered from the spleen (FIGS. 19A and 19B), there is a marked increase in CD44+/CD62L+ cells (or TCM cells) upon IM administration with MEVs-OVA (Gr.2 MEVs-OVA (IM)), as compared to the IM administration of non-loaded MEV (Gr.4—MEVs (IM)), or to the IM administration of OVA in adjuvant (Gr. 1—OVA in adjuvant (IM)). Gr.7-control and Gr.3—Adjuvant (IM) bars are negative and positive controls, respectively. The results indicate that IM administration of MEV-OVA generates a T cell reaction that involves T memory cells. T memory cells are cells that secure the ‘memory’ of the response in the eventuality of a new challenge with the same antigen. The generation of T memory cells is a prerequisite for a good vaccine. These changes above, are observed in the spleen (FIGS. 19A and 19B), but are not clearly observed or are absent in the lymph nodes (FIGS. 20A and 20B).

[0471] FIGS. 21-23 show a CD44(high)/CD49 analysis. FIGS. 21A-21B shows how the gating of the different cell subsets was made: CD4+ and CD4−, CD8+ and CD8−, CD44(hi)+ and CD44(hi)− and CD49+ and CD49−. CD44(hi)+/CD49− cells are indicative of T Virtual Memory Cells (TVM) and CD44(hi)+/CD49+ cells and indicative of T Central Memory Cells (TCM).

[0472] The results show that in CD4+ and CD8+ cells recovered from the spleen (FIGS. 22A and 22B), there is a marked increase in CD44(hi)+/CD49+ cells (or TCM cells) upon IM administration with MEVs-OVA (Gr.2—MEVs-OVA (IM)), as compared to the IM administration of non-loaded MEV (Gr.4—MEVs (IM)), or to the IM administration of OVA in adjuvant (blue bar). Gr.7—control and Gr. 3—Adjuvant (IM) bars are negative and positive controls, respectively. These results are consistent with the results discussed above (FIGS. 18-20B) for CD44+/CD62L+ (FIGS. 18-20) and lead to the same conclusions.

[0473] The results indicate that IM administration of MEV-OVA generates a T cell reaction that involves T memory cells. Again, T memory cells are cells that secure the ‘memory’ of the response in the eventuality of a new challenge with the same antigen. The generation of T memory cells is a prerequisite for a good vaccine. Similarly, the changes above, observed in the spleen (FIGS. 22A-B) are not clearly observed or are absent in the lymph nodes (FIGS. 23A and 23B).

[0474] FIGS. 24A-26B show a CD49/CD11a analysis. FIGS. 24A-24B show how the gating of the different cell subsets was made: CD4+ and CD4−, CD8+ and CD8−, CD49+ and CD49−, and CD11a+ and CD11a−. CD49+/CD11a+ cells are indicative of antigen specific T cells following immunization.

[0475] The results show that in CD4+ and CD8+ cells recovered from the spleen (FIGS. 25A and 25B), there is a marked increase in CD49+/CD11a+ cells (or antigen specific T cells) upon IM administration with MEVs-OVA (Gr.2—MEVs-OVA(IM)), as compared to the IM administration of non-loaded MEV (Gr.4—MEVs (IM)), or to the IM administration of OVA in adjuvant (Gr.1—OVA in adjuvant (IM)). Gr.7—control and Gr. 3—Adjuvant (IM) bars are negative and positive controls, respectively. The results indicate that IM administration of MEV-OVA generates an antigen specific T cell reaction. Similar to the changes above, the changes observed in the spleen (FIGS. 22A and 22B) are not clearly observed or are absent in the lymph nodes (FIGS. 26A and 26B).

### 3. MEVs and Cargo

[0476] MEVs provide numerous advantages for delivery of bioactive molecules, including therapeutic and diagnostic or detectable molecules, compared to other vehicles, including EVs from other sources, including plant sources (see discussion in the section below, and throughout the disclosure). For vaccines and immunomodulation, the MEVs can deliver antigens, including polypeptides, proteins, and antigenic epitopes thereof. The MEVs also can deliver immunomodulators, including, but not limited to, cytokines, chemokines, receptors and/or ligands involved in a disease, disorder, or condition, checkpoint inhibitors, and other such agents. They can be delivered as proteins or portions thereof loaded in the MEVs, and/or as nucleic acids in the MEVs for delivery to targeted cells, tissues, and organs of the immune system or involved in the immune system for expression, if the product is a polypeptide, protein, or portion thereof, or as the therapeutic agent, such as inhibitory RNA. Also provided are MEVs that deliver combinations of products for modulating the immune system and/or serving as vaccines. For example, antigens can be provided with immune modulators that stimulate a complementary immune response. Those of skill in immunology and the vaccine arts can select antigens, immune modulators and combinations thereof to achieve a desired response for immunoprotection, treatments, and other uses and combinations thereof. As discussed, vaccines can be designed to protect against infection by pathogens, to treat infections, to prevent or treat cancers, and other uses known to those of skill in the art.

### 4. Antigens

[0477] Antigens can include full-length proteins and polypeptides, or portions thereof that include or are an epitope. Antigens include antigenic proteins from pathogens, including bacteria, viruses, fungi, and parasites, that stimulate an immunoprotective response or an immune response against the pathogen. The antigens are provided as cargo in the MEVs. They can be provided as polypeptides and peptides, or a nucleic acid, DNA or RNA, encoding the antigen, as cargo in the MEVs. Antigens include those associated with pathogens or with conditions, such as cancer and include tumor-associated antigens expressed by tumor cells, receptors and ligands associated with cancers, oncofetal, and oncoviral antigens. Antigens include any antigen, epitope, neoepitope that results in an immunoprotective response that can be used to treat, or reduce the risk of developing, or reduce the severity, of a disease, disorder, or condition.

[0478] The MEVs can encode as DNA or RNA or deliver a protein, peptide, or portion thereof of an anti-viral or anti-bacterial therapeutic or anti-fungal or anti-parasitic, such as an inhibitor of a viral or bacterial product, or an inhibitor of the expression of a viral or bacterial product, or a viral or bacterial antigen or other immunizing antigen. The MEVs can deliver combinations of immune modulators and the anti-pathogen therapeutic, such as an antigen for mounting an immunoprotective immune response. The combination of the immune response to the antigen and/or the effects of the immune modulator provides a vaccine. The MEVs can be vaccines against and/or for treating or reducing the severity of infectious diseases, including, for example, diseases associated with viral infections, such as chronic viral infections and latent viral infections, such as infections by hepatitis viruses, herpesviruses, varicella zoster virus (VZV), Epstein-Barr virus (EBV), human immunodeficiency virus (HV), human T-cell leukemia virus (HTLV), Respiratory Syncytial Virus (RSV), measles virus, and other such viruses that chronically infect subjects, and/or also acute infections as well, such as initial infections with chronic influenza, P. gingivalis, and coronaviruses, such as Severe Acute Respiratory Syndrome coronavirus (SARS-CoV), Middle East Respiratory Syndrome coronavirus (MERS-CoV), and Severe Acute Respiratory Syndrome coronavirus 2 (SARS-CoV-2, which causes COVID-19). They also can be used as vaccines against respiratory viruses, for example by delivery to the lungs or nasal passages, orally for treating or preventing diseases caused by Enterobacteriaceae, such as E. coli, Klebsiella, Salmonella, and Shigella. The following table provides the sequences of exemplary antigens or antigenic polypeptides (see SEQ ID NOs.160-186). The MEVs can deliver the full-length polypeptides, or portions thereof that comprise an epitope; the MEVs also can deliver nucleic acid, such as encoded in a DNA plasmid, or RNA, such as mRNA.

[0479] The table below lists exemplary antigens for immunization or treatment of exemplary pathogens. As noted, vaccines can be used for treatment of a disease, disorder, or condition, or can be used prophylactically to prevent (including reducing the risk of a disease, disorder, or condition), or reducing the severity of a disease, disorder, or condition. Vaccines, not only can be used for pathogens, but also for treatment/prevention of cancers and other conditions. It is understood that the skilled person can select antigens for particular diseases, disorders, and condition for treatment, prevention, and reducing the risk or severity of a disease, disorder, or condition. The MEVs provide the vehicle for delivery. As described throughout the disclosure herein, MEVs can be conveniently administered via various routes, including orally and intramuscularly, or via inhalation for direct contact with mucosal tissues.

TABLE 2
Examples of vaccine antigens to be used for MEV-mediated immunization and
immunomodulation

| | Pathogen | Species of | |
|---|---|---|---|
| Antigen name | type | origin | Sequence (SEQ ID NOs: 160-186, respectively |
| Heat-labile | Bacterial | Escherichia | >tr\|B8XN37\|B8XN37_ECOLX Heat-labile |
| enterotoxin B | | coli | enterotoxin B subunit (Fragment) |
| subunit | | | OS = Escherichia coli OX = 562 GN = ltb |
| | | | PE = 4 SV = 1 |
| | | | MAPQSITELCSEYRNTQIYTINDKILSYTES |
| | | | MAGKREMVIITFKSGATFQVEVPGSQHIDS |
| | | | QKKAIERMKDTLRITYLTETKIDKLCVWN |
| | | | NKTPNSIAAISMEN |
| Cholera toxin B | Bacterial | Vibrio | >tr\|Q7X2D2\|Q7X2D2_VIBCL Toxin B subunit |
| (CTB) subunit | | cholerae | (Fragment) OS = Vibrio cholerae OX = 666 |
| | | | GN = CTB PE = 2 SV = 1 |
| | | | MTPQNITDLCAEYHNTQIYTLNDKIFSYTE |
| | | | SLAGKREMAIITFKNGAIFQVEVPGSQHIDS |
| | | | QKKAIERMKDTLRIAYLTEAKVEKLCVWN |
| | | | NKTPHAIAAISMANGT |
| extracellular | Bacterial | Yersinia | ncbi.nlm.nih.gov/pmc/articles/PMC1326254/¹ |
| capsule protein | | pestis | MADLTASTTATATLVEPARITL TYKEGAPI |
| F1/immune- | | | TIMDNGNIDTELLVGTLTLGGYKTGTTSTS |
| modulator V fusion | | | VNFTDAAGDPMYLTFTSQDGNNHQFTTKV |
| protein | | | IGKDSRDFDISPKVNGENLVGDDVVLATGS |
| | | | QDFFVRSIGSKGGKLAAGKYTDAVTVTVS |
| | | | NQEFMIRAYEQNPQHFIEDLEKVRVEQLTG |
| | | | HGSSVLEELVQLVKDKNIDISIKYDPRKDS |
| | | | EVFANRVITDDIELLKKILAYFLPEDAILKG |
| | | | GHYDNQLQNGIKRVKEFLESSPNTQWELR |
| | | | AFMAVMHFSLTADRIDDDILKVIVDSMNH |
| | | | HGDARSKLREELAELTAELKIYSVIQAEIN |
| | | | KHLSSSGTINIHDKSINLMDKNLYGYTDEEI |
| | | | FKASAEYKILEKMPQTTIQVDGSEKKIVSIK |
| | | | DFLGSENKRTGALGNLKNSYSYNKDNNEL |
| | | | SHFATTCSDKSRPLNDLVSQKTTQLSDITSR |
| | | | FNSAIEALNRFIQKYDSVMQRLLDDTSGK |
| Outer membrane | Bacterial | Shigella | >tr\|A0A0H2VSY6\|A0A0H2VSY6_SHIFL |
| protein receptor | | flexneri | Outer membrane protein receptor for |
| for ferrichrome | | | ferrichrome, colicin M, and phages T1, T5, |
| | | | and phi80 OS = Shigella flexneri OX = 623 |
| | | | GN = fhuA PE = 3 SV = 1 |
| | | | MARSKTAQPKHSLRKIAVVVATAVSGMSV |
| | | | YAAAVEPKEDTITVTAAPAPQESAWGPAA |
| | | | TIAARQSATGTKTDTPIQKVPQSISVVTAEE |
| | | | MALHQPKSVKEALSYTPGVSVGTRGASNT |
| | | | YDHLIIRGFAAEGQSQNNYLNGLKLQGNF |
| | | | YNDAVIDPYMLERAEIMRGPVSVLYGKSS |
| | | | PGGLLNMVSKRPTTEPLKEVQFKAGTDSLF |
| | | | QTGFDFSDALDDDGVYSYRLTGLARSANA |
| | | | QQKGSEEQRYAIAPAFTWRPDDKTNFTFLS |
| | | | YFQNEPETGYYGWLPKEGTVEPLPNGKRL |
| | | | PTDFNEGAKNNTYSRNEKMVGYSFDHEFN |
| | | | DTFTVRQNLRFAENKTSQNSVYGYGVCSD |
| | | | PANAYSKQCAALAPADKGHYLARKYVVD |
| | | | DEKLQNFSVDTQLQSKFATGDIDHTLLTGV |
| | | | DFMRMRNDINAWFGYDDSVPLFNLYNPV |
| | | | NPDFDFNAKDPANSGPYRILNKQKQTGVY |
| | | | VQDQAQWDKVLVTLGGRYDWADQESLN |
| | | | RVAGTTDKRDDKQFTWRGGVNYLFDNGV |
| | | | TPYFSYSESFEPSSQVGKDGNIFAPSKGKQ |
| | | | YEVGVKYVPEDRPIVVTGAVYNLTKTNNL |
| | | | MADPEGSFFSVEGGEIRARGVEIEAKAALS |
| | | | ASVNVVGSYTYTDAEYTTDTTYKGNTPAQ |
| | | | VPKHMASLWADYTFFDGPLSGLTLGTGGR |
| | | | YTGSSYGDPANSFKVGSYTVVDALVRYDL |
| | | | ARVGMAGSNVALHVNNLFDREYVASCFN |
| | | | TYGCFWGAERQVVATATFRF |
| Outer membrane | Bacterial | Pseudomonas | >tr\|A6V748\|A6V748_PSEA7 Outer membrane |
| protein OprF | | aeruginosa | protein OprF OS = Pseudomonas aeruginosa |
| | | | (strain PA7) OX = 381754 GN = oprF PE = 4 |
| | | | SV = 1 |
| | | | MKLKNTLGVVIGSLVAASAMNAFAQGQN |
| | | | SVEIEAFGKRYFTDSVRNMKNADLYGGSI |
| | | | GYFLTDDVELALSYGEYHDVRGTYETGNK |
| | | | KVHGNLTSLDAIYHFGTPGVGLRPYVSAG |
| | | | LAHQNITNINSDSQGRQQMTMANIGAGLK |
| | | | YYFTENFFAKASLDGQYGLEKRDNGHQGE |
| | | | WMAGLGVGFNFGGSKAAPAPEPVADVCS |
| | | | DSDNDGVCDNVDKCPDTPANVTVDANGC |
| | | | PAVAEVVRVQLDVKFDFDKSKVKENSYA |
| | | | DIKNLADFMKQYPSTSTTVEGHTDSVGTD |
| | | | AYNQKLSERRANAVRDVLVNEYGVEGGR |
| | | | VNAVGYGESRPVADNATAEGRAINRRVEA |
| | | | EVEAEAK |
| N-terminal portion | Bacterial | Staphylococcus | ncbi.nlm.nih.gov/pmc/articles/PMC8876328/² |
| of the Candida | | aureus | AKTITGVFNSFNSLTWSNAATYNYKGPGT |
| albicans | | | PTWNAVLGWSLDGTSASPGDTFTLNMPCV |
| agglutinin- | | | FKFTTSQTSVDLTAHGVKYATCQFQAGEE |
| like protein 3 | | | FMTFSTLTCTVSNTLTPSIKALGTVTLPLAF |
| (Als3p) | | | NVGGTGSSVDLEDSKCFTAGTNTVTFNDG |
| | | | GKKISINVDFERSNVDPKGYLTDSR VIPSLN |
| | | | KVSTLFVAPQCANGYTSGTMGFANTYGD |
| | | | VQIDCSNIHVGITKGLNDWNYPVSSESFSY |
| | | | TKTCSSNGIFITYKNVPAGYRPFVDAYISAT |
| | | | DVNSYTLSYANEYTCAGGYWQRAPFTLR |
| | | | WTGYRNSDAGSNGIVIVATTRTVTDSTTA |
| | | | VTTLPFDPNRDKTKTIEILKPIPTTTITTSYV |
| | | | GVTTSYSTKTAPIGETATVIVDIPYHTTTTV |
| | | | TSKWTGTITSTTTHTNPTDSIDTVIVQVP |
| 27-kDa outer | Bacterial | Salmonella | pubmed.ncbi.nlm.nih.gov/21300870/³ |
| membrane protein | | enterica | MKNFFAVCIIPLVVTWSATASAKEGIYITG |
| (T2544) | | serovar Typhi | KAGTSVVNVYGINSTFSQEEIVNGHATLPD |
| | | | RTKGVFGGGVAIGYDFYDPFQLPVRLELD |
| | | | TTFRGETDAKGGQDIIAFGQPVHINVKNQV |
| | | | RMTTYIVNGYYDFHNSTAFTPYISAGVGLA |
| | | | HVKLSNNTIPVGFGINETLSASKNNFAWGA |
| | | | GIGAKYAVTDNIMIDASYKYINAGKVSISK |
| | | | NHYAGDEHTAYDADTKAASNDFMLGITY |
| | | | AF |
| Hepatitis B | Viral | Hepatitis B | >tr\|Q81158\|Q81158_HBV Surface antigen |
| surface antigen | | virus (HBV) | (HBsAg) OS = Hepatitis B virus OX = 10407 |
| (HBsAg) | | | PE = 2 SV = 1 |
| | | | MENTTSGFLGPLLVLQAGFFLLTRILTIPQS |
| | | | LDSWWTSLNFQGGAPTCPGQNSQSPTSNH |
| | | | SPTSCPPICPGYRWMCLRRFIIFLFILLLCLIF |
| | | | LLVLLDYQGMLPVCPLLPGTSTTGTGPCRT |
| | | | CTIPAQGTSMFPSCCCTKPSDGNCTCIPIPSS |
| | | | WAFARFLWEWASVRFSWLSLLVPFVQWF |
| | | | AGLSPTVWLSVIWMMWYRGPSLYNTLSPF |
| | | | LPLLPISFCLWVYI |
| E1-E2 genome | Viral | Hepatitis C | ncbi.nlm.nih.gov/pmc/articles/PMC43144/⁴ |
| polyprotein | | virus (HCV) | >tr\|B5DA15\|B5DA15_9HEPC Genome |
| | | genotype | polyprotein (Fragment) OS = hepatitis C |
| | | 1a | virus genotype 1a OX = 2847144 GN = E1-E2 |
| | | | PE = 3 SV = 1 |
| | | | PTVALVTAQLLRIPQAILDMIAGAHWGVL |
| | | | AGIAYFSMVGNWAKVLVVLLLFAGVDAE |
| | | | TYTTGGNAGRVTARLTGLFSPGAKQKIQL |
| | | | VNTNGSWHINSTALNCDDSLNTGWVAGLF |
| | | | YHHKFDSSGCPERLASCRPLADFAQGWGPI |
| | | | SHASGSGPDQRPYCWHYPPKPCGIVPAKS |
| | | | VCG |
| Inner capsid | Viral | Human rotavirus | >tr\|B6CSK9\|B6CSK9_9VIRU Inner capsid |
| protein VP6 | | A | protein VP6 (Fragment) OS = Human rotavirus |
| | | | A OX = 10941 PE = 4 SV = 1 |
| | | | FNPIILRPNNVEVEFLLNGQIINTYQARFGTI |
| | | | VARNFDTIRLSFQLMRPPNMTPAVNALFPQ |
| | | | AQPFQHHATVGLTLRIESAVCESVLADANE |
| | | | TLLANVTAVRQEYAIPVGPVF |
| Outer capsid | Viral | Rotavirus A | >tr\|Q6SKR8\|Q6SKR8_9VIRU Outer capsid |
| glycoprotein VP7 | | | glycoprotein VP7 OS = Rotavirus A OX = 28875 |
| | | | GN = VP7 PE = 1 SV = 1 |
| | | | MYGIEYTTVLTFLISFILLNYILKSLTRMMD |
| | | | FVIYRFLFVIVVLSPLLKAQNYGINLPITGS |
| | | | MDTAYANSTQEETFLTSTLCLYYPTEAATE |
| | | | INDNSWKDTLSQLFLTKGWPTGSIYFREYT |
| | | | DIVSFSVDPQLYCDYNVVLMKYDAALQLD |
| | | | MSELADLILNEWLCNPMDITLYYYQQTDE |
| | | | ANKWISMGSSCTIKVCPLNTQTLGIGCLTT |
| | | | DTATFEEVATAEKLVITDVVDGVNHKLDV |
| | | | TTATCTIRNCKKLGPRENVAVIQVGGSDVL |
| | | | DITADPTTAPQTERMMRINWKKWWQVFY |
| | | | TVVDYVNQIIQLMSKRSRSLNSAAFYYRV |
| Capsid protein | Viral | Norwalk virus | >tr\|Q8QWP1\|Q8QWP1_9CALI Capsid protein |
| | | (NV) | (Fragment) OS = Norwalk virus OX = 11983 |
| | | | PE = 4 SV = 1 |
| | | | MKMASNDAAPSNDGAAGLVPEINNEAMA |
| | | | LEPVAGAIAAPLTGQQNIIDPWIMNNFVQA |
| | | | PGGEFTVSPRNSPGEVLLNLELGPEINPYLA |
| | | | HLA |
| spike protein S1 | Viral | SARS- | ncbi.nlm.nih.gov/pmc/articles/PMC1157057/⁵ |
| fragment | | coronavirus | SDLDRCTTFDDVQAPNYTQHTSSMRGVYY |
| | | (CoV) | PDEIFRSDTLYLTQDLFLPFYSNVTGFHTIN |
| | | | HTFGNPVIPFKDGIYFAATEKSNVVRGWVF |
| | | | GSTMNNKSQSVIIINNSTNVVIRACNFELCD |
| | | | NPFFAVSKPMGTQTHTMIFDNAFNCTFEYI |
| | | | SDAFSLDVSEKSGNFKHLREFVFKNKDGFL |
| | | | YVYKGYQPIDVVRDLPSGFNTLKPIFKLPL |
| | | | GINITNFRAILTAFSPAQDIWGTSAAAYFVG |
| | | | YLKPTTFMLKYDENGTITDAVDCSQNPLA |
| | | | ELKCSVKSFEIDKGIYQTSNFRVVPSGDVV |
| | | | RFPNITNLCPFGEVFNATKFPSVYAWERKK |
| | | | ISNCVADYSVLYNSTFFSTFKCYGVSATKL |
| | | | NDLCFSNVYADSFVVKGDDVRQIAPGQTG |
| | | | VIADYNYKLPDDFMGCVLAWNTRNIDATS |
| | | | TGNYNYKYRYLRHGKLRPFERDISNVPFSP |
| | | | DGKPCTPPALNCYWPLNDYGFYTTTGIGY |
| | | | QPYRVVVLSFELLNAPATVCGPKLSTDLIK |
| | | | NQCVNFNFNGLTGTGVLTPSSKRFQPFQQF |
| | | | GRDVSDFTDSVRDPKTSEILDISPCSFGGVS |
| | | | VITPGTNASSEVAVLYQDVNCTDVSTAIHA |
| | | | DQLTPAWRIYSTGNNVFQTQAGCLIGAEH |
| | | | VDTSYECDIPIGAGICASYHTVSLLRSTSQK |
| | | | SIVAYTMSLGADSSIAYSNNTIAIPTNFSISIT |
| | | | TEVMPVSM |
| B5R antigenic | Viral | Vaccinia virus | ncbi.nlm.nih.gov/pmc/articles/PMC1871876/⁶ |
| ectodomain | | | TCTVPTMNNAKLTSTETSFNDKQKVTFTC |
| | | | DQGYHSSDPNAVCETDKWKYENPCKKMC |
| | | | TVSDYISELYNKPLYEVNSTMTLSCNGETK |
| | | | YFRCEEKNGNTSWNDTVTCPNAECQPLQL |
| | | | EHGSCQPVKEKYSFGEYMTINCDVGYEVI |
| | | | GASYISCTANSWNVIPSCQQKCDMPSLSNG |
| | | | LISGSTFSIGGVIHLSCKSGFTLTGSPSSTCID |
| | | | GKWNPVLPICVRTNEEFDPVDDGPDDETD |
| | | | LSKLSKDVVQYEQEIESL |
| envelope protein | Viral | Japanese | uniprot.org/uniprotkb/P27395/entry#Envelope_ |
| (E) | | encephalitis | protein E |
| | | virus (JEV) | FNCLGMGNRDFIEGASGATWVDLVLEGDS |
| | | | CLTIMADKPTLDVRMINIEASQLAEVRSYC |
| | | | YHASVTDISTVARCPTTGEAHNEKRADSSY |
| | | | VCKQGFTDRGWGNGCGLFGKGSIDTCAKF |
| | | | SCTSKAIGRTIQPENIKYEVGIFVHGTTTSE |
| | | | NHGNYSAQVGASQAAKFTVTPNAPSITLK |
| | | | LGDYGEVTLDCEPRSGLNTEAFYVMTVGS |
| | | | KSFLVHREWFHDLALPWTSPSSTAWRNRE |
| | | | LLMEFEGAHATKQSVVALGSQEGGLHQAL |
| | | | AGAIVVEYSSSVKLTSGHLKCRLKMDKLA |
| | | | LKGTTYGMCTEKFSFAKNPVDTGHGTVVI |
| | | | ELSYSGSDGPCKIPIVSVASLNDMTPVGRL |
| | | | VTVNPFVATSSANSKVLVEMEPPFGDSYIV |
| | | | VGRGDKQINHHWHKAGSTLGKAFSTTLK |
| | | | GAQRLAALGDTAWDFGSIGGVFNSIGRAV |
| | | | HQVFGGAFRTLFGGMSWITQGLMGALLL |
| | | | WMGVNARDRSIALAFLATGGVLVFLATN |
| | | | VHA |
| VP4N20 antigenic | Viral | Coxsackievirus | pubmed.ncbi.nlm.nih.gov/26073737/⁷ |
| peptide | | 16 (CV-A16) | GSQVSTQRSGSHENSNSASE |
| VP4N20 antigenic | Viral | Enterovirus 71 | pubmed.ncbi.nlm.nih.gov/26073737/⁷ |
| peptide | | (EV71) | GSQVSTQRSGSHENSNSASE |
| Minor capsid | Viral | Human | >sp\|P03107\|VL2_HPV16 Minor capsid protein |
| protein L | | papillomavirus | L2 OS = Human papillomavirus type 16 |
| | | type 16 | OX = 333760 GN = L2 PE = 1 SV = 1 |
| | | (HPV-16) | MRHKRSAKRTKRASATQLYKTCKQAGTC |
| | | | PPDIIPKEGKTIAEQILQYGSMGVFFGGLGI |
| | | | GTGSGTGGRTGYIPLGTRPPTATDTLAPVR |
| | | | PPLTVDPVGPSDPSIVSLVEETSFIDAGAPTS |
| | | | VPSIPPDVSGFSITTSTDTTPAILDINNTVTT |
| | | | VTTHNNPTFTDPSVLQPPTPAETGGHFTLSS |
| | | | STISTHNYEEIPMDTFIVSTNPNTVTSSTPIP |
| | | | GSRPVARLGLYSRTTQQVKVVDPAFVTTP |
| | | | TKLITYDNPAYEGIDVDNTLYFSSNDNSINI |
| | | | APDPDFLDIVALHRPALTSRRTGIRYSRIGN |
| | | | KQTLRTRSGKSIGAKVHYYYDLSTIDPAEE |
| | | | IELQTITPSTYTTTSHAASPTSINNGLYDIYA |
| | | | DDFITDTSTTPVPSVPSTSLSGYIPANTTIPF |
| | | | GGAYNIPLVSGPDIPINITDQAPSLIPIVPGSP |
| | | | QYTIIADAGDFYLHPSYYMLRKRRKRLPYF |
| | | | FSDVSLAA |
| Envelope | Viral | Human | >sp\|Q69091\|GD_HHV11 Envelope glycoprotein |
| glycoprotein D | | herpesvirus 1 | D OS = Human herpesvirus 1 (strain 17) |
| | | (HHV-1) | OX = 10299 GN = gD PE = 1 SV = 1 |
| | | | MGGAAARLGAVILFVVIVGLHGVRSKYAL |
| | | | VDASLKMADPNRFRGKDLPVLDQLTDPPG |
| | | | VRRVYHIQAGLPDPFQPPSLPITVYYAVLE |
| | | | RACRSVLLNAPSEAPQIVRGASEDVRKQPY |
| | | | NLTIAWFRMGGNCAIPITVMEYTECSYNKS |
| | | | LGACPIRTQPRWNYYDSFSAVSEDNLGFL |
| | | | MHAPAFETAGTYLRLVKINDWTEITQFILE |
| | | | HRAKGSCKYALPLRIPPSACLSPQAYQQGV |
| | | | TVDSIGMLPRFIPENQRTVAVYSLKIAGWH |
| | | | GPKAPYTSTLLPPELSETPNATQPELAPEDP |
| | | | EDSALLEDPVGTVAPQIPPNWHIPSIQDAAT |
| | | | PYHPPATPNNMGLIAGAVGGSLLAALVICG |
| | | | IVYWMRRHTQKAPKRIRLPHIREDDQPSSH |
| | | | QPLFY |
| envelope domain | Viral | Zika virus | ncbi.nlm.nih.gov/pmc/articles/PMC9721077/⁸ |
| III protein | | | GVSYSLCTAAFTFTKIPAETLHGTVTVEVQ |
| | | | YAGTDGPCKVPAQMAVDMQTLTPVGRLIT |
| | | | ANPVITESTENSKMMLELDPPFGDSYIVIGV |
| | | | GEKKITHHWHRSGSTIGKAFEATVRGAKR |
| | | | MAVLGDTAWDFGSVGGALNSLGKGIHQIF |
| | | | GAAFKS |
| Major surface | Viral | Human | >sp\|P03423\|GLYC_HRSVA Major surface |
| glycoprotein G | | respiratory | glycoprotein G OS = Human respiratory |
| | | syncytial | syncytial virus A (strain A2) OX = 11259 |
| | | virus A | GN = G PE = 1 SV = 1 |
| | | (RSV strain A2) | MSKNKDQRTAKTLERTWDTLNHLLFISSC |
| | | | LYKLNLKSVAQITLSILAMIISTSLIIAAIIFIA |
| | | | SANHKVTPTTAIIQDATSQIKNTTPTYLTQN |
| | | | PQLGISPSNPSEITSQITTILASTTPGVKSTLQ |
| | | | STTVKTKNTTTTQTQPSKPTTKQRQNKPPS |
| | | | KPNNDFHFEVFNFVPCSICSNNPTCWAICK |
| | | | RIPNKKPGKKTTTKPTKKPTLKTTKKDPKP |
| | | | QTTKSKEVPTTKPTEEPTINTTKTNIITTLLT |
| | | | SNTTGNPELTSQMETFHSTSSEGNPSPSQVS |
| | | | TTSEYPSQPSSPPNTPRQ |
| domain III | Viral | Dengue virus | pubmed.ncbi.nlm.nih.gov/17659815/⁹ |
| fragment of dengue | | type 2 | YSMCTGKFKVVKEIAETQHGTIVIRVQYEG |
| 2 envelope protein | | | DGSPCKIPFEIMDLEKRHVLGRLITVNPIVT |
| (D2EIII) | | | EKDSPVNIEAEPPFGDSYIIIGVEPGQLKLS |
| | | | WFKKGSSIGQMFETTMRGAKRMAILGDTA |
| | | | W |
| Merozoite surface | Protozoan | Plasmodium | >tr\|076244\|076244 PLAFA Merozoite surface |
| protein 4 (MSP4) | | falciparum | protein 4 OS = Plasmodium falciparum |
| | | | OX = 5833 GN = MSP4 PE= 4 SV = 1 |
| | | | MWIVKFLIVVHFFIICTINFDKLYISYSYNIV |
| | | | PENGRMLNMRILGEEKPNVDGVSTSNTPG |
| | | | GNESSSASPNLSDAAEKKDEKEASEQGEES |
| | | | HKKENSQESANGKDDVKEEKKTNEKKDD |
| | | | GKTDKVQEKVLEKSPKESQMVDDKKKTE |
| | | | AIPKKVVQPSSSNSGGHVGEEEDHNEGEGE |
| | | | HEEEEEHEEDDDDEDDDTYNKDDLEDEDL |
| | | | CKHNNGGCGDDKLCEYVGNRRVKCKCKE |
| | | | GYKLEGIECVELLSLASSSLNLIFNSFITIFV |
| | | | VILLIN |
| Merozoite surface | Protozoan | Plasmodium | >tr\|Q9U8B4\|Q9U8B4_PLAFA Merozoite |
| protein 5 (MSP5) | | falciparum | surface protein 5 OS = Plasmodium falciparum |
| | | | OX = 5833 GN = msp5 PE = 4 SV = 1 |
| | | | MNILCILSYIYFLVIFYSLNLNNKNENFLVV |
| | | | RRLMNDEKGEGGFTSKNKENGNNNRNNE |
| | | | NELKEEGSLPTKMNEKNSNSSDKQPNDISH |
| | | | DESKSNSNNSQNIQKEPEEKENSNPNLDSS |
| | | | ENSSESATRSVDISEHNSNNPETKEENGEEP |
| | | | LDLEINENAEIGQEPPNRLHFDNVDDEVPH |
| | | | YSALRYNKVEKNVTDEMLLYNMMSDQNR |
| | | | KSCAINNGGCSDDQICININNIGVKCICKDG |
| | | | YLLGTKCIILNSYSCHPFFSILIYITLFLLLFV |
| Trans-sialidase | Protozoan | Trypanosoma | >tr\|Q26966\|Q26966_TRYCR Trans-sialidase |
| | | cruzi | OS = Trypanosoma cruzi OX = 5693 PE = 1 |
| | | | SV = 1 |
| | | | MLAPGSSRVELFKRQSSKVPFEKDGKVTE |
| | | | RVVHSFRLPALVNVDGVMVAIADARYETS |
| | | | NDNSLIDTVAKYSVDDGETWETQIAIKNSR |
| | | | ASSVSRVVDPTVIVKGNKLYVLVGSYNSS |
| | | | GKITASIKWGSPVSLKEFFPAEMEGMHTNQ |
| | | | FLGGAGVAIVASNGNLVYPVQVTNKKKQ |
| | | | VFSKIFYSEDEGKTWKFGKGRSAFGCSEPV |
| | | | ALEWEGKLIINTRVDYRRRLVYESSDMGN |
| | | | SWLEAVGTLSRVWGPSPKSNQPGSQSSFT |
| | | | AVTIEGMRVMLFTHPLNFKGRWLRDRLNL |
| | | | WLTDNQRIYNVGQVSIGDENSAYSSVLYK |
| | | | DDKLYCLHEINSNEVYSLVFARLVGELRII |
| | | | KSVLQSWKNWDSHLSSICTPADPAASSSER |
| | | | GCGPAVTTVGLVGFLSHSATKTEWEDAYR |
| | | | CVNASTANAERVPNGLKFAGVGGGALWP |
| | | | VSQQGQNQRYRFANHAFTVVASVTIHEVP |
| | | | SVASPLLGASLDSSGGKKLLGLSYDERHQ |
| | | | WQPIYGSTPVTPTGSWEMGKRYHVVLTM |
| | | | ANKIGSEYIDGEPLEGSGQTVVPDERTPDIS |
| | | | HFYVGGYKRSDMPTISHVTVNNVLLYNRQ |
| | | | LNAEEIRTLFLSQDLIGTEAHMDSSSDTSA |
| A2 protein | Protozoan | Leishmania | >tr\|A4HZU7\|A4HZU7_LEIIN A2 protein |
| | | infantum | OS = Leishmania infantum OX = 5671 |
| | | | GN = LINJ_22_0670 PE = 4 SV = 1 |
| | | | MKIRSVRPL VVLL VCVAA VLAL SASAEPH |
| | | | KAAVDVGPLSVDVGPLSVGPQSVGPLSVG |
| | | | PQSVGPLSVDVGPLSVGPQSVGPLSVDVGP |
| | | | LSVGPQSVGPLSVGPQAVGPLSVGPQSVGP |
| | | | LSVDVGPQAVGPQSVGPLSVGPQSVGPLS |
| | | | VGPQSVGPLSVGPLSVGPQSVGSLSVGPQS |
| | | | VGPLSVGPLSVDVGPQAVGPLSVGPQAVG |
| | | | PLSVGPQSVGPLSVGPQSVGPLSVGPQSVG |
| | | | PLSVGPQSVGPLSVGPQSVGPLSVDVGPQS |
| | | | VGPLSVGPQSVGPLSVGPQSVGPLSVGPQS |
| | | | VGPLSVGPQSVGPLSVGPQSVGPLSVGPQA |
| | | | VGPLSVDVGPQSVGPLSVGPQAVGPLSVG |
| | | | PQSVGPLSVGPQSVGPLSVDVGQQSVGPLS |
| | | | VGPQSVGPLSVGPQSVGPLSVGPQAVGPLS |
| | | | VGPQAVGPLSVGPQAVGPLSVGPQSVGPL |
| | | | SVGPQAVGPLSVGPQAVGPLSVGPQSVGP |
| | | | LSVGLQAVDVSPVS |
| N-terminal portion | Fungal | Candida | pubmed.ncbi.nlm.nih.gov/16779733/₁₀ |
| of the Candida | | albicans | AKTITGVFNSFNSLTWSNAATYNYKGPGT |
| albicans | | | PTWNAVLGWSLDGTSASPGDTFTLNMPCV |
| agglutinin- | | | FKFTTSQTSVDLTAHGVKYATCQFQAGEE |
| like protein 3 | | | FMTFSTLTCTVSNTLTPSIKALGTVTLPLAF |
| (Als3p) | | | NVGGTGSSVDLEDSKCFTAGTNTVTFNDG |
| | | | GKKISINVDFERSNVDPKGYLTDSRVIPSLN |
| | | | KVSTLFVAPQCANGYTSGTMGFANTYGD |
| | | | VQIDCSNIHVGITKGLNDWNYPVSSESFSY |
| | | | TKTCSSNGIFITYKNVPAGYRPFVDAYISAT |
| | | | DVNSYTLSYANEYTCAGGYWQRAPFTLR |
| | | | WTGYRNSDAGSNGIVIVATTRTVTDSTTA |
| | | | VTTLPFDPNRDKTKTIEILKPIPTTTITTSYV |
| | | | GVTTSYSTKTAPIGETATVIVDIPYHTTTTV |
| | | | TSKWTGTITSTTTHTNPTDSIDTVIVQVP |

¹Santi et al. (2006). Protection conferred by recombinant Yersinia pestis antigens produced by a rapid and highly scalable plant expression system. Proceedings of the National Academy of Sciences of the United States of America, 103(4), 861-866. doi.org/10.1073/pnas.0510014103
²Jahantigh et al. (2022). The Candidate Antigens to Achieving an Effective Vaccine against Staphylococcus aureus. Vaccines, 10(2), 199, doi.org/10.3390/vaccines10020199
³Ghosh et al. (2011). An adhesion protein of Salmonella enterica serovar Typhi is required for pathogenesis and potential target for vaccine development. Proceedings of the National Academy of Sciences of the United States of America
⁴Choo et al., (1994). Vaccination of chimpanzees against infection by the hepatitis C virus. Proceedings of the National Academy of Sciences of the United States of America, 91(4), 1294-1298. doi.org/10.1073/pnas.91.4.1294
⁵Pogrebnyak et al. (2005). Severe acute respiratory syndrome (SARS) S protein production in plants: development of recombinant vaccine. Proceedings of the National Academy of Sciences of the United States of America, 102(25), 9062-9067, doi.org/10.1073/pnas.0503760102
⁶Golovkin et al. (2007). Smallpox subunit vaccine produced in Planta confers protection in mice. Proceedings of the National Academy of Sciences of the United States of America, 104(16), 6864-6869, doi.org/10.1073/pnas.0701451104
⁷Zhang et al. (2016). Phage Display-Derived Cross-Reactive Neutralizing Antibody against Enterovirus 71 and Coxsackievirus A16. Japanese journal of infectious diseases, 69(1), 66-74, doi.org/10.7883/yoken.JJID.2015.060
⁸Shin et al. (2022). Vaccination with a Zika virus envelope domain III protein induces neutralizing antibodies and partial protection against Asian genotype in immunocompetent mice. Tropical medicine and health, 50(1), 91, doi.org/10.1186/s41182-022-00485-6
⁹Saejung, et al. (2007). Production of dengue 2 envelope domain III in plant using TMV-based vector system. Vaccine, 25(36), 6646-6654, doi.org/10.1016/j.vaccine.2007.06.029
¹⁰Spellberg et al. (2006). Efficacy of the anti-Candida rAls3p-N or rAlslp-N vaccines against disseminated and mucosal candidiasis. The Journal of infectious diseases, 194(2), 256-260, doi.org/10.1086/504691

### 5. Immunomodulators

a. MEV-Mediated Intracellular Signaling and Other Receptors and Ligands for Preventing, Reducing the Risk of, or Treating a Disease, Disorder, or Condition

### MEV-Mediated Immunomodulation Via Toll-Like Receptor (TLR) Signaling

[0480] Toll-like receptors (TLRs) are a family of evolutionary conserved pattern recognition receptors, by which the immune system senses microbes via recognition of a wide range of microbial components. In mammals, 11 different TLRs have been described and most of them are widely expressed by different cell types in the immune system including dendritic cells (DCs), macrophages, NK cells, mast cells, neutrophils, B cells, T cells and by non-immune cells such as fibroblasts, epithelial cells and keratinocytes. Most TLRs (TLR 1, 2, 4, 5, 6, 10 and 11) are expressed on the cell surface, whereas other TLRs (TLR 3, 7, 8, 9) are present within the endosomal compartments. For example, on the cell surface TLR2 recognizes several bacterial and fungal cell wall components, TLR4 recognizes lipopolysaccharides (LPS) from most bacteria, and TLR5 recognizes flagellin. Intracellular receptors detect bacterial and viral nucleic acids. For example, TLR3 senses viral dsRNA, whereas TLR9 recognizes CpG motifs present in bacterial and viral DNA. MEVs are internalized into cells, into endosomes, which fuse with those bearing internalized TLRs; the MEVs release their cargo, such as TLR agonists or antagonists to interact with the TLRs, thereby modulating TLR-mediated responses to affect immune responses, including, but not limited to pro- and anti-inflammatory response, including immunostimulatory, such as antibacterial responses and anti-cancer responses, immunosuppressive responses, such as for treating autoimmune diseases, allergies, and other diseases, disorders, and conditions that involve the immune system.

[0481] Upon activation, TLRs propagate the pattern-induced signal transduction pathway leading to innate immune response, including cytokine production, cell proliferation (or apoptosis) and stimulation of phagocytosis. These initiate inflammatory responses and activate phagocytes such as neutrophils and macrophages. TLRs also represent an important link between innate and adaptive immunity through their presence in DCs, which play a central role in coordinated activation of innate and adaptive immune mechanisms triggered by pathogen-derived signals. Multiple ligands of TLRs were proved effective in augmenting adaptive immune responses. For example, combined activation of TLR3 and TLR7 signaling resulted in rapid DC activation, secretion of proinflammatory cytokines and expression of costimulatory molecules that were able to increase cytotoxic T-cells (CTL) effector functions. TLR ligands, like monophosphoryl lipid A (TLR4 agonist) or CpG motifs (TLR9 agonists), have been found to enhance immunogenicity of vaccine candidates. Moreover, the innate immune system (including TLR signaling) modulates the quantity and quality of long-term T and B cell memory and protective immune responses to pathogens. Activation of TLR4 receptors on B cells, and concomitant antigen stimulation of cognate B-cell receptors, induced antigen-specific IgG responses totally independent of T-cell help. TLR-regulated innate immunity can be effectively used to modulate both the cellular and humoral arms of adaptive immune response.

[0482] It is shown herein that administration of MEVs containing agonists or antagonists of TLRs can be administered, such as orally, and the effect of the agonist or antagonist will be manifested biologically demonstrating that MEVs can be delivered to target cells and can modulate activities of TLRs in those cells to manifest a response mediated by the cargo delivered by the MEV.

[0483] Uncontrolled regulation of TLR-mediated signaling can lead to excessive or persistent inflammation and severe immune pathologies. Several diseases including septic shock, autoimmunity, atherosclerosis, metabolic syndrome and gastric cancer have been linked to chronic or acute inflammatory response. Thus, TLR signaling pathway suppression also is a therapeutic approach for inhibiting disease-associated inflammation in disorders such as rheumatoid arthritis, sepsis, allergies, Alzheimer's disease, Parkinson's disease, inflammatory bowel diseases, ulcerative colitis, or Crohn's disease. MEVs loaded with TLR ligand(s), either agonists or antagonists, can be used for MEV-mediated immunomodulation via TLR signaling, immunostimulatory, such as vaccines, and immunosuppressive, such as anti-inflammatory, applications. See FIGS. 17A and 17B that depict MEVs and their interactions with TLRs and ligands.

[0484] In vivo therapeutic targets, in general, thus, include receptors that are involved in a disease, disorder, or condition. These include cell surface receptors, and internalized receptors, in which the MEVs deliver agonists, antagonists, ligands, or other modulators of activity. Targets of interest include, for example, modulation of toll-like receptors (TLRs) and other receptors, including receptors, such as the TLRs, that are internalized. Such receptors are internalized into vesicles and can interact with ligands delivered by MEVs. This is exemplified in the Examples in which the ligand flagellin is delivered into cells via MEVs; flagellin activates TLR-5, which in turn activates inflammatory cytokines.

[0485] Flagellin is a conserved protein, a component of the bacterial flagellum in mobile bacteria. The immune systems in plants and in animals that assure the defense against bacterial infections are set to recognize flagellin, or subrogate peptides thereof, and to react against the invading bacteria. Thus, the presence of bacteria, their flagella, or fragments thereof triggers a signaling pathway, that leads to a reaction of the host to the putative infection agent. In plants, flagellin is recognized by the FLS2 receptor (Flagellin Sensing 2 receptor). For instance, the presence of flagellin, or of surrogate peptides of it, is detected by the leaf epithelium that surrounds the stomata (the respiratory pores on the surface of the leaves). Open stomata are entry doors into the leaf parenchyma for infective agents such as flagellin-bearing bacteria. When the presence of flagellin is detected in the leaf epithelium, the plant triggers an immune response, which includes the immediate closing of the stomata in order to physically prevent the entry of bacteria thereby. The signaling pathway, that starts by the detection of flagellin (or of subrogate peptides) and ends with the closing of the stomata, is triggered by the binding of flagellin (or of subrogate peptides) to the FLS2 receptor. The transmembrane protein receptor, FLS2, is the very first component in the signaling pathway. In Arabidopsis thaliana, a species commonly used as a plant model, the FLS2 receptor is found in the plasma membrane and in the membranes of endosomal vesicles inside the plant cell (see, Beck et al., (2012) The Plant cell 24(10):4205-4219 and Otegui et al. (2008) Traffic (Copenhagen, Denmark) 9(10):1589-1598). The flagellin binding domains are oriented either to the “extracellular space” (for the FLS2 molecules located in the plasma membrane); or to the “intra-endosomal space” (for the FLS2 molecules located in intracellular endosomal vesicles). The FLS2 domains in charge of the triggering of the signaling pathway are in both cases oriented towards the cytoplasmic side of the membranes. A signaling pathway and the subsequent biological immune response triggered by the binding of flagellin (or of a surrogate peptide) to FLS2 are indistinguishable whether the triggering FLS2 is located in the plasma membrane and detects flagellin in the cell surface or located in an endosomal vesicle and detects flagellin from within the same endosomal vesicle. Although, it is straightforward for FLS2 located in the plasma membrane to identify and bind to flagellin (or to subrogate or surrogate peptides), it is less likely that FLS2 will find flagellin (or a subrogate or surrogate peptide) inside the endosomal vesicle where the intracellular FLS2 form is located.

[0486] Experiments shown in the working Examples herein, demonstrate that MEVs that have been exo-loaded with flp22, a subrogate or surrogate peptide of flagellin, can trigger the expected biological immune reaction, i.e., the immediate closing of the stomata, presumably by the delivery of the bioactive peptide straight into the endosomal vesicles where FLS2 is located. As flp22-loaded MEVs are treated with proteases to destroy any trace of external flp22 that remain from the exo-loading reaction; the immune reaction cannot be explained by free flp22 binding to the FLS2 in the plasma membrane. There is no evidence that MEVs (or other EVs) spontaneously release their cargo in the extracellular or culture media which might trigger a signaling pathway from the FLS2 in the plant's membrane. Thus, the observed data are difficult to explain unless the flp22-loaded MEVs are endocytosed by the epithelial plant cells, and that once inside the cells the endocytic vesicles carrying the loaded-MEVs can fuse with endosomal vesicles that carry the FLS2 protein.

[0487] Experiments described in the Examples show delivery of flg22 into A. thaliana cells via intracellular signaling that is mediated by MEVs. The flg22 peptide, is a 22-amino acid synthetic peptide, which mimics a conserved N-terminal region of bacterial flagellin. It has been shown that flp22 binds to plasma membrane FLS2 triggering a defense response of the cell against bacteria. But it had not been shown that free flp22 can be delivered directly to endosomal vesicles or that from there it can trigger the same biological response that it triggers from the cell surface. Effective delivery of the peptide inside the endosomal vesicles, mediated by peptide loaded-MEVs, allows such phenomenon to take place and to be observed.

[0488] In plants, this 22-amino acid synthetic peptide, mimicking a conserved N-terminal region of the bacterial flagellin, is bound by the surface receptor Flagellin Sensing 2 (FLS2) triggering a defense response. The signal upon ligand binding is transduced from the membrane receptor to intracellular FLS2 kinase and results in altering gene expression profile. Our findings indicate that flg22-loaded Chlorella MEVs are able to induce stomata closure. This response is triggered by the bioactive peptide present in the intact MEVs, while any remaining non-loaded flg22 is degraded with proteinase K treatment. Therefore, the FLS2 ligand is delivered into the host cells and is able to bind to the receptor inside the cell. This interaction can result from internalization of the surface receptor.

[0489] Multiple clathrin-independent mechanisms of endocytosis have been described and characterized; some of which play a role in membrane bulk flow and cell membrane turnover. It is also known that FLS2 can be internalized into vesicles, not only upon ligand binding, but also in a ligand-independent manner for constitutive recycling (see, Beck et al., (2012) The Plant cell 24(10):4205-4219). FLS2 signaling also occurs from endosomes after internalization (see, Otegui et al. (2008) Traffic (Copenhagen, Denmark) 9(10):1589-1598). Plant endosomes are highly dynamic organelles; hence a rendezvous of ligand-carrying MEVs and receptor-carrying vesicles is possible inside the cell. This intracellular interaction results in fusion of MEVs and endosomes, providing ligand-mediated activation of FLS2 and production of the effector signaling. Similar mechanisms of endosome turnover are present in yeast and mammals, where endosomes are also known to recycle vacuolar cargo receptors back to the trans Golgi network and sort membrane proteins for degradation in the vacuole/lysosome. FLS2 can be internalized into vesicles not only upon ligand binding, but also in a ligand-independent manner for constitutive recycling (Beck et al. (2012). Spatio-temporal cellular dynamics of the Arabidopsis flagellin receptor reveal activation status-dependent endosomal sorting. The Plant Cell, 24(10), 4205-4219). Moreover, FLS2 signaling can also occur from endosomes after internalization (Otegui et al. (2008). Endosomal functions in plants, Traffic (Copenhagen, Denmark), 9(10), 1589-1598). Plant endosomes are highly dynamic organelles, hence a rendezvous between MEVs and receptor-carrying vesicles can occur inside the cell. This intracellular interaction results in fusion of MEVs and endosomes, providing ligand-mediated activation of FLS2 and production of the effector signaling. Similar mechanisms of endosome turnover are present in yeast and mammals, where endosomes are also known to recycle vacuolar cargo receptors back to the trans Golgi network and sort membrane proteins for degradation in the vacuole/lysosome.

[0490] Cellular defense against invading pathogens relies on innate immune responses that are initiated by activation of pattern recognition receptors, which include Toll-like receptors (TLRs). These receptors also can be activated inadvertently by nucleic acid-based therapeutics, thereby hampering drug development. TLRs7/8/9 is a subfamily of structurally related endosomal receptors that respond to specific single-stranded nucleic acid molecules. TLR7 and TLR8 respond to RNA, and TLR9 responds to DNA.

[0491] Bacterial DNA is a potent immunostimulant and the abundance of CpG dinucleotides (CpGs) in genomes of prokaryotes is a factor contributing to its immunostimulatory properties. Toll-like receptor 9 (TLR9) is a major player in the innate immune response to bacterial DNA and synthetic oligodeoxynucleotides (ODNs) that contain unmethylated CpG motifs (see, Hemmi et al. A Toll-like receptor recognizes bacterial DNA. Nature. 2000, 408 (6813): 740-745).

[0492] The members of the TLR family are well-conserved type I transmembrane proteins characterized by a leucine-rich domain involved in ligand recognition and a toll/interleukin-1 receptor (TTR) intracellular signaling domain (see, Takeda et al. Toll-like receptors in innate immunity. Int Immunol. 2005, 17 (1): 1-14). Acting as innate immune receptors, members of this family mediate the response to different bacteria- and virus-derived molecules, including lipopolysaccharide, bacterial lipopeptides, double-stranded RNA and CpGs.

[0493] In mammals, the TLR9 occurs in the endoplasmic reticulum in resting immune cells. Upon exposure of the cells to CpG DNA, TLR9 translocates to the endosomal compartments (see, Latz et al., TLR9 signals after translocating from the ER to CpG DNA in the lysosome. Nat Immunol. 2004, 5 (2): 190-198), where it can interact with its ligand. Once activated, the receptor signals through Myeloid differentiation primary response gene 88 (MyD88) to activate transcription factors including nuclear factor kappa-B (NF-κB) and interferon-regulatory factor 3 (IRF3), and interferon-regulatory factor 7 (IRF7), each involved in the upregulation of proinflammatory genes and type I interferon (IFN), respectively (Kumagai et al. TLR9 as a key receptor for the recognition of DNA. Adv Drug Deliv Rev. 2008, 60 (7): 795-804).

[0494] TLR signaling is divided into two types of pathways: one of which is MyD88-dependent and the other MyD88-independent but Toll-interleukin-1 receptor (TIR)-domain-containing adaptor-inducing IFN-β (TRIF)-dependent. Downstream of the TLR signaling pathways, activated NF-κB and IRF (interferon (IFN) regulatory factor) control their target genes to produce an abundance of inflammatory cytokines and IFNs, which improve resistance to and clearance of pathogens from the body, and can also promote inflammation (see, e.g., Lu et al. Toll-like Receptors and Inflammatory Bowel Disease. Front Immunol. 9:72, 2018). Other functions of the latter factors are to upregulate the expression of related genes responsible for phagocytosis and the ability to enhance phagocytic function and to kill microbes. From these functions, TLR signaling recruits activated natural killer cells (NK cells) and DCs. DCs are prompted by TLRs to present antigens to T cells and initiate T cell responses, thus providing a bridge between innate immunity and adaptive immunity. TLRs and the signaling pathways also exist in T cells. Follicular helper T cells are produced abundantly in germinal centers and interact with B cells, a process that is also mediated by T cell intrinsic TLR signaling. TLRs additionally regulate B-cell responses for the purpose of producing monospecific IgM, IgG, and IgA antibodies, which are involved in adaptive immunity that can mediate mucosal homeostasis. TLRs and TLR-activated signaling pathways are involved not only in the pathogenesis but also in the efficacy of treatment of IBD and other inflammatory diseases.

[0495] TLRs have a role in the detection of microbial infection in mammals and insects, and also in pathways to effect treatment of diseases, disorders, and conditions. These roles can be exploited herein through delivery of ligands by the MEVs to modulate TLR activities.

[0496] In mammals, the TLRs recognize conserved products unique to microbial metabolism. This specificity allows the Toll proteins to detect the presence of infection and to induce activation of inflammatory and antimicrobial innate immune responses. Recognition of microbial products by Toll-like receptors expressed on dendritic cells triggers functional maturation of dendritic cells and leads to initiation of antigen-specific adaptive immune responses. It is shown herein that MEVs can deliver, such as via oral administration or inhalation or other routes to immune cells, agonists and/or antagonists of TLRs (or encoding nucleic acid), such as TLR9 and TLR3, and result in a biological response indicative of activation of the TLR-induced pathway or response or of inhibition of the TLR-induced pathway or response. Thus, MEVs are an ideal delivery vehicle for modulating the immune system via TLRs and other intracellular receptors.

[0497] There are similarities between how plants and animals perceive pathogens. Plants have highly sensitive perception systems that stimulate defense responses, but innate immunity in animals is based on the recognition of similar pathogen-associated molecular patterns. FLS2 in Arabidopsis, which is essential for flagellin perception, shares homology with the Toll-like receptor (TLR) family, which is a first line of defense against infectious diseases in animals (Gõmez-Gómez et al. (2002). Flagellin perception: a paradigm for innate immunity. Trends in Plant Science, 7(6), 251-256). TLR5 is responsible for flagellin perception in mammals, but other receptors from this family, including TLR1, TLR2, TLR3, TLR4 and TLR6, can also be considered as targets for intracellular MEV-mediated ligand delivery. This phenomenon indicates that there are number of therapeutic indications for TLR agonists. For example, immunomodulatory of TLR agonists can be used in infections (e.g., sepsis) and inflammation, (e.g., inflammatory bowel diseases, including ulcerative colitis and Crohn's disease, and rheumatoid arthritis), as part of or with a vaccine (including cancer vaccines) and for allergy treatment to enhance an immune response or modulate an immune response from the vaccine.

[0498] These results indicate that when a MEV loaded with a ligand (agonist or antagonist) for either an internalized receptor, or for an endosomal intracellular receptor, such as the FLS2 receptor, the TLRs or other such receptors, are internalized, as shown in the Examples, they reach and deliver their payload inside the vesicles where the target receptors are located and thus elicit a biological response from “within the cell”. Thus, MEVs can deliver agonists/antagonists or ligands to internalized or to intracellular receptors. No other alternative technologies have shown to be able of such an endeavor. See FIGS. 17A and 17B, discussed in the Examples.

[0499] Plant FLS2 protein is a member of the large family of the so-called TLRs (or Toll-like Receptors), which play a pivotal role in innate immunity and in the modulation and triggering of immune responses in humans, mammals, and other animals. There are similarities between how plants and animals perceive pathogens. Plants have highly sensitive perception systems that stimulate defense responses, and innate immunity in animals is based on the recognition of similar pathogen-associated molecular patterns. FLS2 in Arabidopsis, which is essential for flagellin perception, shares homology with the Toll-like receptor (TLR) family, which is a first line of defense against infectious diseases in animals (see, Gómez-Gómez et al. (2002) Trends in Plant Science 7(6):251-256).

[0500] TLR5 is responsible for flagellin perception in mammals, but other receptors from this family, including TLR3, TLR7, TLR8, TLR9, TLR13, (naturally located in cellular endocytic vesicles) also can be targets for intracellular MEV-mediated ligand delivery. This phenomenon paves the way for treatment of a number of therapeutic indications using specific ligand-loaded MEVs to trigger the immunomodulatory signaling pathways related to the different TLR family members; such as for infections (like sepsis and other), for inflammation (like rheumatoid arthritis and other), to enhance or modulate the immune response to a vaccine (including cancer vaccines) as well as for allergy treatment. The following tables summarize TLR members, their ligands and agonists/antagonists, and downstream effects:

| TLR | | |
|---|---|---|
| Member | Ligand(s)/Agonists | Actions/Downstream effects |
| TLR1 | Triacyl lipopeptides | Myeloid differentiation primary response |
| | (Pam3CSK4) | (MyD88)* and MAL/TIRAP**-dependent |
| | | activation of inflammatory cytokines, NF-KB and |
| | | AP-1; Induces phagocytosis of ligand, or bound |
| | | molecules |
| TLR2 | Zymosan, Porin, Modulin, | MyD88 and MAL/TIRAP-dependent activation of |
| | Lipoproteins, Lipotechoic acid, | inflammatory cytokines, NF-KB and AP-1; |
| | Diacyl lipopeptides, Atypical | Induces phagocytosis of ligand, or bound |
| | LPS, Peptidoglycan, Triacyl | molecules |
| | lipopeptides | |
| TLR3 | dsRNA | Trif dependent induction of Inflammatory |
| | | cytokines and Type I IFN; Initiates adaptive |
| | | immunity; Activates local cytokine burst and local |
| | | inflammatory response; Production of TNF-alpha, |
| | | IL-12, MCP1. |
| TLR4 | Mannans, Taxol, LPS | Trif and TRAM dependent induction of |
| | | inflammatory cytokines and Type -I IFN, TIRAP |
| | | and MyD88 induction of inflammatory cytokines; |
| | | Promotes addiction; Neuroinflammatory response |
| TLR5 | bacterial flagellin, profilin, | MyD88-dependent induction of NF-kB and |
| | HMGB1, Small molecule | inflammatory cytokines, activation of innate and |
| | agonists (CBLB502) | adaptive immunity |
| TLR6 | Zymosan, Porin, Modulin, | MyD88 and MAL/TIRAP-dependent activation of |
| | Lipoproteins, Lipoteichoic acid, | inflammatory cytokines, NF-KB and AP-1; |
| | Diacyl lipopeptides | Induces phagocytosis of ligand, or bound |
| | (Pam2CSK4), Atypical LPS, | molecules |
| | Peptidoglycan | |
| TLR7 | imidazoquinolinone, loxoribine, | MyD88 dependent induction of inflammatory |
| | ssRNA, bropirimine, resiquimod | cytokines and Type I IFN |
| TLR8 | ssRNA, small synthetic | MyD88 dependent induction of inflammatory |
| | compounds | cytokines and Type I IFN |
| TLR9 | CpG DNA | MyD88 dependent induction of inflammatory |
| | | cytokines and Type I IFN |
| TLR10 | Diacyl and Triacyl lipopeptides | TRIF-dependent activation of IFN-B; TRADD |
| | | dependent and/or MyD88 and TIRAP-dependent |
| | | activation of pro-inflammatory cytokines; |
| | | PI3K/Akt dependent activation of IL-1Ra; Direct |
| | | inhibition of MyD88 or MAPK--Anti- |
| | | inflammatory; |
| TLR11 | Profilin-like protein, non- | MyD88 dependent induction of inflammatory |
| | pathogenic bacteria | cytokines |

*TIR-containing adaptor protein (Tirap), also called MyD88 adaptor-like protein (MAL)
**toll/Interleukin-1 receptor domain containing adaptor protein

| TLR | | |
|---|---|---|
| Member | Ligand(s)/Antagonists | Action/Downstream Effects |
| TLR1 | Small molecule antagonists (CU- | Competitive inhibition of signaling cascade; |
| | T12-9, MMG-11) | Inhibition heterodimerization of TLR1/2; |
| | | Induce M1 macrophages to M2 phenotype; |
| | | Inhibition of immune response; |
| | | Inhibition of inflammatory response |
| TLR2 | Small Molecule Antagonists | Competitive inhibition of signaling cascade; |
| | (AT1-AT8, CU-CPT22, CU- | Inhibition of heterodimerization of TLR1/2; |
| | T12-9, MMG-11, NPT1220- | Induction of M1 macrophages to M2 phenotype; |
| | 312), Phloretin, Sulfoglycolipids | Reduction of immune response; |
| | | Reduction of inflammatory Response; |
| | | Reduction of TNF-alpha production, reduced nitric |
| | | oxide (NO) formation; Reduced TLR2-induced |
| | | NF-KB transcriptional activity; |
| | | Reduction of NLRP3 including IL-1B, and 1L-18 |
| TLR3 | Small Molecule Antagonists | Decreased production of IL-6, IL-8, MIP1-alpha, |
| | (CU-CPT4a), Monoclonal | and TNF-alpha |
| | antibodies (CNTO4685, | |
| | CNTO5429) | |
| TLR4 | Small Molecule Antagonists | Decreased NF-kB activation and cytokine |
| | (Norbinaltorphimine, T4ICs, | production, reduction of nitric oxide (NO) |
| | T5342126, Simvastatin | formation; Decreased addiction |
| TLR5 | Small Molecule Antagonist | Decreased NF-kB, AP-1 signaling and decreased |
| | (TH1020) | induction of proinflammatory cytokines; Altered |
| | | gut microbiome, tumor growth, metabolic |
| | | syndrome, liver fibrosis |
| TLR6 | Simvastatin | Reduction in cytokine production; Prevention of |
| | | macrophage activation |
| TLR7 | Chloroquine, | Reduction of IFN-1 and cytokine signaling, |
| | hydroxychloroquine, quinacrine | reduction of inflammation |
| TLR8 | Small Molecule Antagonist (CU- | Reduced induction of TNF, IL-6, and IL-10 |
| | CPT8m, CU-CPT9a) | |
| TLR9 | Small Molecule Antagonists | Blocks release of inflammatory cytokines in |
| | (NPT1220-312), chloroquine, | monocyte/macrophage cells; decreased |
| | hydroxychloroquine, quinacrine; | immunostimulatory response |
| | Suppressive or inhibitory | |
| | oligonucleotides | |
| TLR10 | — | — |

### Cytokines and Chemokines, Co-Stimulatory Molecules, and Others

[0501] Immune modulators can be delivered as cargo in the MEVs, and/or combined with antigens. Immunomodulators include cytokines and chemokines, which modulate immune responses. Some consider chemokines to be a subset of cytokines. Chemokines, include interleukins, and interferons. The immune modulators include the cytokines or chemokines, or molecules that upregulate or downregulate expression of the cytokines and/or chemokines in a treated subject.

### Cytokines

[0502] Interleukin-2 (IL-2) is implicated in the activation of the immune system by several mechanisms, including the activation and promotion of cytotoxic T lymphocyte (CTL) growth, the generation of lymphokine-activated killer (LAK) cells, the promotion of regulatory T-cell (Treg cell) growth and proliferation, the stimulation of tumor-infiltrating lymphocytes (TILs), and the promotion of T-cell, B cell, and NK cell proliferation and differentiation. IL-7, which is a member of the IL-2 superfamily, is implicated in the survival, proliferation, and homeostasis of T-cells. IL-7 is a homeostatic cytokine that provides continuous signals to resting naïve and memory T-cells, and which accumulates during conditions of lymphopenia, leading to an increase in both T-cell proliferation and T-cell repertoire diversity. In comparison to IL-2, IL-7 is selective for expanding CD8⁺ T-cells over CD4⁺FOXP3⁺ regulatory T-cells. Recombinant IL-7 can augment antigen-specific T-cell responses following vaccination and adoptive cell therapy in mice. IL-7 has antitumor effects in tumors, such as gliomas, melanomas, lymphomas, leukemia, prostate cancer, and glioblastomas, and the in vivo administration of IL-7 in murine models resulted in decreased cancer cell growth, and can enhance the antitumor effects of IFN-γ. IL-12, and forms thereof, is secreted by antigen-presenting cells, promotes the secretion of IFN-7 from NK and T-cells, inhibits tumor angiogenesis, results in the activation and proliferation of NK cells, CD8⁺ T-cells, and CD4⁺ T-cells, enhances the differentiation of naïve CD4⁺ T-cells into Th1 cells, and promotes antibody-dependent cell-mediated cytotoxicity (ADCC) against tumor cells. IL-15 and forms thereof, provides stimulation for the proliferation and activation of T-cells, IL-15 blocks IL-2 induced apoptosis, which is a process that leads to the elimination of stimulated T-cells and the induction of T-cell tolerance, limiting memory T-cell responses, and potentially limiting the therapeutic efficacy of IL-2 alone. IL-18 induces the secretion of IFN-7 by NK and CD8⁺ T-cells, enhancing their toxicity. IL-18 also activates macrophages and stimulates the development of Th1 helper CD4⁺ T-cells.

[0503] Cytokines for delivery include, but are not limited to, any used therapeutically, such as for example, IL-15, IL-15/IL-15R alpha chain complex, IL-12, and others, type I interferon (IFN), including IFN-alpha, and IFN-beta, interferon-gamma, and others.

### Chemokines

[0504] Chemokines are a family of small cytokines that mediate leukocyte migration to areas of injury or inflammation, and that are involved in mediating immune and inflammatory responses. Chemokines are classified into four subfamilies, based on the position of cysteine residues in their sequences, namely XC-, CC-, CXC-, and CX3C-chemokine ligands, or XCL, CCL, CXCL, and CX3CL. The chemokine ligands bind to their cognate receptors and regulate the circulation, homing, and retention of immune cells, with each chemokine ligand-receptor pair selectively regulating a certain type of immune cell. Different chemokines attract different leukocyte populations, and form a concentration gradient in vivo, with attracted immune cells moving through the gradient towards the higher concentration of chemokine (see, e.g., Argyle D. and Kitamura, T. (2018) Front. Immunol. 9:2629; and Dubinett et al. (2010) Cancer J. 16(4):325-335). Chemokines can improve the anti-tumor immune response by increasing the infiltration of immune cells into the tumor, and facilitating the movement of antigen-presenting cells (APCs) to tumor-draining lymph nodes, which primes naïve T-cells and B cells (see, e.g., Lechner et al. (2011) Immunotherapy 3(11):1317-1340). The immunostimulatory bacteria provided herein can be engineered to encode chemokines or deliver cytokines or active forms thereof. Chemokines, include, but are not limited to CCL3, CCL4, CCL5, CXCL9, CXCL10, and CXCL 11. CCL3, CCL4, and CCL5 share a high degree of homology, and bind to CCR5 (CCL3, CCL4, and CCL5) and CCR1 (CCL3 and CCL5) on several cell types, including immature DCs and T-cells. The induction of the T helper cell type 1 (Th1) response releases CCL3. CCL3 and CCL4 play a role in directing CD8⁺ T-cell infiltration into primary tumor sites in melanoma and colon cancers. The binding of CCL3 or CCL5 to their receptors (CCR1 and CCR5), moves immature DCs, monocytes, and memory and T effector cells from the circulation into sites of inflammation or infection. For example, CCL5 expression in colorectal tumors contributes to T lymphocyte chemoattraction and survival. CXCL9 (MIG), CXCL10 (IP10), and CXCL11 (ITAC) are induced by the production of IFN-7. These chemokines bind CXCR3, preferentially expressed on activated T-cells, and function angiostatically, and in the recruitment and activation of leukocytes. In vivo, CXCL9 functions as a chemoattractant for tumor-infiltrating lymphocytes (TILs), activated peripheral blood lymphocytes, natural killer (NK) cells, and Th1 lymphocytes. CXCL10, produced by activated monocytes, fibroblasts, endothelial cells and keratinocytes, is chemotactic for activated T-cells, and can act as an inhibitor of angiogenesis in vivo. CXCL10/11 and CXCR3 expression has been established in human keratinocytes derived from basal cell carcinomas (BCCs). CXCL11 also is capable of promoting immunosuppressive indoleamine 2,3-dioxygenase (IDO) expression in human basal cell carcinoma, as well as enhancing keratinocyte proliferation, which could reduce the anti-tumor activity of any infiltrating CXCR3⁺ effector T-cells (see, e.g., Kuo et al. (2018) Front. Med. (Lausanne) 5:271).

### Co-Stimulatory Molecules

[0505] Co-stimulatory molecules enhance the immune response against tumor cells, and co-stimulatory pathways are inhibited by tumor cells to promote tumorigenesis. Exemplary of co-stimulatory molecules are CD40, CD40L, 4-1BB, 4-1BBL, 4-1BBL, CD80, CD86, CD27L, B7RP1, OX40L, and CD28. CD28 is a co-stimulatory molecule expressed on the surface of T-cells that acts as a receptor for B7-1 (CD80) and B7-2 (CD86), which are co-stimulatory molecules expressed on antigen-presenting cells. CD28-B7 signaling is required for T-cell activation and survival, and for the prevention of T-cell anergy, and results in the production of interleukins, such as IL-6.

### TNF Receptor Superfamily

[0506] The TNF superfamily of ligands (TNFSF) and their receptors (TNFRSF) are involved in the proliferation, differentiation, activation and survival of tumor and immune effector cells. Members of this family include CD30, Fas-L, TRAIL-R, and TNF-R, which induce apoptosis, and CD27, OX40L, CD40L, GITR-L, and 4-1BBL, which regulate B and T-cell immune responses. Other members include herpesvirus entry mediator (HVEM). CD40, which is a member of the TNF receptor superfamily, is expressed by APCs and B cells, while its ligand, CD40L (CD154), is expressed by activated T-cells. Interaction between CD40 and CD40L stimulates B cells to produce cytokines, resulting in T-cell activation and tumor cell death. Studies have shown that anti-tumor immune responses are impaired with reduced expression of CD40L on T-cells or CD40 on dendritic cells.

[0507] Therapeutic targets for MEV-mediated delivery and expression, include receptors involved in diseases, disorders, or conditions, such that said receptors are cell surface receptors, and internalized receptors or internal (intracellular endosomal) receptors, such TLRs and others. MEVs may deliver agonists, antagonists, ligands, or other modulators of activity of such receptors. Targets of interest include, for example, modulation of toll-like receptors (TLRs). Such receptors are internalized into endosomal vesicles and can interact with ligands delivered by MEVs. This is exemplified in the Examples in which flagellin, surrogates thereof, and other known ligands for TLRs are delivered into cells via MEVs; activation of TLRs in turn activates inflammatory cytokines.

[0508] These can be provided in MEVs in combination with vaccines, such as antigens or epitopes, that elicit an immune response to protect against, or treat a disease, disorder, or condition. These receptors and other immune modulators can be introduced into the same MEVs, or can be provided in other MEVs, which can be administered with the vaccine MEVs together, in the same composition, or in separate compositions, or intermittently, depending upon a particular vaccination or treatment regimen. MEVs carrying different cargo can be co-formulated, or provided separately.

### Other Immunomodulators

[0509] Those of skill in the art are familiar with immunomodulators, which include, but are not limited to, checkpoint inhibitors, such as inhibitors of PD-1, PD-L1, and CTLA4. The cargo can comprise checkpoint inhibitor antibodies, generally single chain antibodies and antigen-binding fragments thereof, and other immunomodulatory antibodies and fragments thereof.

### I. FORMULATIONS, ROUTES OF ADMINISTRATION, AND DISEASE AND DISORDERS

[0510] Provided are compositions containing the MEVs in an amount suitable for effecting treatment for a particular disease or disorder. The amount can depend upon the therapeutic cargo, the disease, or disorder, and the subject treated. It is within the level of skill in the art to ascertain a particular dosage of MEVs. Formulations include any known to those of skill and include, for example:
[0511] injectables for intravenous administration, to reach the liver and the spleen;
[0512] oral, such as, for example tablets, capsules, films, and troches;
[0513] drops for per os administration, to reach the intestine, such as a vaccine, the immune system (immune cells), and the spleen;
[0514] compositions, such as emulsions (microemulsions and nanoemulsions) for inhalation, such for intratracheal, intrapulmonary administration; to reach the lungs;
[0515] drops for intranasal administration; and
[0516] formulations, such as creams, oils, gels, lotions, ointments for the skin and the mucosa.

[0517] Provided are pharmaceutical compositions containing, in a pharmaceutically acceptable vehicle microalgae extracellular vesicles (MEVs). The MEVs can contain an agent, generally a therapeutic or biologically active agent, such as nucleic acid, particularly an RNA, a protein, a small molecule, and other such agents. The compositions contain an amount of the MEV that can be diluted to deliver a therapeutically effective amount of the agent, or are formulated for direct administration without dilution. The particular concentration of MEVs depends upon a variety of parameters within the skill of a skilled artisan, including, for example, the treated indication; the active agent; the route of administration; the disease, disorder, or condition to be treated; and the regimen. Routes of administration include systemic and local routes, oral, rectal, intravenous, intramuscular, subcutaneous, mucosal, inhalation, nasal, eye, peritoneal, intratracheal, intravitreal, vaginal, and any suitable route known to the skilled person.

[0518] Pharmaceutical carriers or vehicles suitable for administration of the compounds provided herein include any such carriers known to those skilled in the art to be suitable for the particular mode of administration.

### Exemplary Formulations

[0519] Pharmaceutical compositions containing the MEVs can be formulated in any conventional manner, by mixing a selected amount of the active compound with one or more physiologically acceptable carriers or excipients. Selection of the carrier or excipient is within the skill of the administering professional, and can depend upon a number of parameters. These include, for example, the mode of administration (i.e., systemic, oral, nasal, pulmonary, local, topical, or any other mode), and the disorder treated. The formulations also can be co-formulations with other active agents for combination therapy.

[0520] A selected amount of MEVs are formulated in a suitable vehicle for administration by a selected route. The pharmaceutical compositions can be formulated in any conventional manner, by mixing a selected amount of MEVs with one or more physiologically acceptable carriers or excipients or vehicles. The pharmaceutical composition can be used for therapeutic, prophylactic, cosmetic and/or diagnostic applications. The concentration of the MEVs in a composition, depends on a variety of factors, including those noted above, as well as the absorption, inactivation, and excretion rates of the active agent cargo, the release of the cargo, the mechanism of release, the dosage schedule, and the amount administered, the age and size of the subject, as well as other factors known to those of skill in the art, and related to the properties of the MEVs.

[0521] The pharmaceutical compositions provided herein can be in various forms, such as, but not limited to, in solid, semi-solid, liquid, emulsions, powder, aqueous, and lyophilized forms. The pharmaceutical compositions provided herein can be formulated for single dosage (direct) administration, or for dilution, or other regimen. The concentrations of the compounds in the formulations are effective, either following dilution or mixing with another composition, or for direct administration, for delivery of an amount, upon administration, that is effective for the intended treatment. The compositions can be formulated in an amount for single or multiple dosage direct administration. The form of composition depends a variety of factors, including the intended mode of administration. The resulting mixtures are solutions, suspensions, emulsions and other such mixtures, and can be formulated as creams, gels, ointments, emulsions, solutions, lotions, suspensions, tinctures, pastes, foams, aerosols, irrigations, and sprays. For oral administration, the MEVs can be formulated as tablets, capsules, lozenges, liquids, and others.

[0522] For local internal administration, such as intramuscular, parenteral or intra-articular administration, the MEVs can be formulated in isotonically buffered saline. The effective concentration of the MEVs is sufficient to provide a sufficient amount of the cargo agent for the intended purpose, and can be empirically determined.

[0523] Generally, pharmaceutically acceptable compositions are prepared in view of approvals for a regulatory agency, or other agency, and/or are prepared in accordance with generally recognized pharmacopeia for use in animals and in humans. Pharmaceutical compositions can include a carrier, such as a diluent, adjuvant, excipient, or vehicle, with which a polypeptide is administered. Such pharmaceutical carriers can be sterile liquids, such as water and oils, including those of petroleum, animal, vegetable or synthetic origin, such as peanut oil, soybean oil, mineral oil, and sesame oil. Water is a typical carrier when the pharmaceutical composition is administered intravenously. Saline solutions and aqueous dextrose and glycerol solutions also can be employed as liquid carriers, particularly for injectable solutions. Compositions can contain, along with an active ingredient, a diluent, such as lactose, sucrose, dicalcium phosphate, and carboxymethylcellulose; a lubricant, such as magnesium stearate, calcium stearate and talc; and a binder, such as starch, natural gums, such as gum acacia, gelatin, glucose, molasses, polyvinylpyrrolidone, celluloses and derivatives thereof, povidone, crospovidone, and other such binders known to those of skill in the art. Suitable pharmaceutical excipients include starch, glucose, lactose, sucrose, gelatin, malt, rice, flour, chalk, silica gel, sodium stearate, glycerol monostearate, talc, sodium chloride, dried skim milk, glycerol, propylene glycol, water, and ethanol. A composition, if desired, also can contain minor amounts of wetting or emulsifying agents, or pH buffering agents, for example, acetate, sodium citrate, cyclodextrin derivatives, sorbitan monolaurate, triethanolamine sodium acetate, triethanolamine oleate, and other such agents. These compositions can take the form of solutions, suspensions, emulsions, tablets, pills, capsules, powders, granules, and sustained release formulations. Capsules and cartridges of, e.g., gelatin, for use in an inhaler or insufflator, can be formulated containing a powder mix of a therapeutic compound and a suitable powder base, such as lactose or starch. A composition can be formulated as a suppository, with traditional binders and carriers, such as triglycerides. Oral formulations can include standard carriers, such as pharmaceutical grades of mannitol, lactose, starch, magnesium stearate, sodium saccharine, cellulose, magnesium carbonate, and other such agents. Preparations for oral administration also can be suitably formulated with protease inhibitors, such as a Bowman-Birk inhibitor, a conjugated Bowman-Birk inhibitor, aprotinin and camostat. Examples of suitable pharmaceutical carriers are described in “Remington's Pharmaceutical Sciences” by E. W. Martin. Such compositions will contain a therapeutically effective amount of the compound, generally in purified form, together with a suitable amount of carrier, so as to provide the compound in a form for proper administration to a subject or patient.

[0524] The pharmaceutical compositions provided herein can contain other additives, including, for example, antioxidants, preservatives, antimicrobial agents, analgesic agents, binders, disintegrants, colorings, diluents, excipients, extenders, glidants, solubilizers, stabilizers, tonicity agents, vehicles, viscosity agents, flavoring agents, emulsions, such as oil-in-water or water-in-oil emulsions, emulsifying and suspending agents, such as acacia, agar, alginic acid, sodium alginate, bentonite, carbomer, carrageenan, carboxymethylcellulose, cellulose, cholesterol, gelatin, hydroxyethyl cellulose, hydroxypropyl cellulose, hydroxypropyl methylcellulose, methylcellulose, octoxynol-9, oleyl alcohol, povidone, propylene glycol monostearate, sodium lauryl sulfate, sorbitan esters, stearyl alcohol, tragacanth, xanthan gum, and derivatives thereof, solvents, and miscellaneous ingredients, such as crystalline cellulose, microcrystalline cellulose, citric acid, dextrin, dextrose, liquid glucose, lactic acid, lactose, magnesium chloride, potassium metaphosphate, and starch, among others (see, generally, Alfonso R. Gennaro (2000) Remington: The Science andPractice of Pharmacy, 20th Edition. Baltimore, MD: Lippincott Williams & Wilkins). Such carriers and/or additives can be formulated by conventional methods and can be administered to the subject at a suitable dose. Stabilizing agents, such as lipids, nuclease inhibitors, polymers, and chelating agents, can preserve the compositions from degradation within the body.

[0525] The formulation should suit the mode of administration. For example, the MEVs can be formulated for parenteral administration by injection (e.g., by bolus injection, or continuous infusion). The injectable compositions can take such forms as suspensions, solutions or emulsions in oily or aqueous vehicles. The sterile injectable preparation also can be a sterile injectable solution, or a suspension in a non-toxic parenterally-acceptable diluent or solvent, for example, as a solution in 1,4-butanediol. Sterile, fixed oils are conventionally employed as a solvent or suspending medium. For this purpose, any bland fixed oil can be employed, including, but not limited to, synthetic mono- or diglycerides, fatty acids (including oleic acid), naturally occurring vegetable oils, such as sesame oil, coconut oil, peanut oil, cottonseed oil, and other oils, or synthetic fatty vehicles like ethyl oleate. Buffers, preservatives, antioxidants, and the suitable ingredients, can be incorporated as required, or, alternatively, can comprise the formulation. The MEVs provided herein, can be formulated as a pharmaceutically active ingredient in the composition, or can be combined with other active ingredients. Suspension of the MEVs can be suitable for administration. These can be prepared according to methods known to those skilled in the art.

[0526] Suitable compositions for inhalation, including into the nose, administration include but are not limited to, powders, sprays, liquids, suspensions, emulsions, and any other form that can be administered directly to the nose and that can contain the MEVs. The concentration of MEVs can be empirically determined, and depends upon the cargo, the indication treated, or intended use.

[0527] The therapeutically effective concentration of the MEVs can be determined empirically by testing the compounds in known in vitro and in vivo systems Determination of a therapeutically effective amount is well within the capability of those skilled in the art.

### J. EXAMPLES

[0528] The following examples are included for illustrative purposes only and are not intended to limit the scope of the invention(s).

### Example 1

### Production of Chlorella Cells and Isolation of MEVs

### A. Batch Production of the Inoculum

[0529] Chlorella vulgaris of any strain can be used to produce MEVs. Exemplary strains include, but are not limited to, UTEX 265 strain, UTEX 395 strain, UTEX 26 strain, 15 UTEX 30 strain, UTEX 259 strain, UTEX 2219 strain, UTEX 2714 strain UTEX B 1811 (available from the UTEX Culture Collection), the strain designated CCAP 211/19, GEPEA, University of Nantes, France, and any other suitable strain, either transformed or not, can be used to produce the algal cell material. For exemplary purposes, the UTEX 265 strain was used.

[0530] Chlorella was stored on nutrient agar slopes until flask/photobioreactor (PBR) inoculation. For different experiments, different scales of production, between 400 mL (flasks) to 170 L (several PBRs with different total volume) cultures, were used. This description relates to the highest volume of PBR used (170 L, HECTOR PBR “Hector” photobioreactor designed by the Laboratory of Process Engineering—Environment—Agri-food (GEPEA)/CNRS for the culture of microalgae. Reference: 20160067_0017. Year of production: 2016. Maximum size: 56.43×37.66 cm/170 L/300 dpi]).

[0531] A 5-Liter PBR was filled with 4 L of sterile BG11 medium (see, e.g., utex.org/products/bg-11-medium for a description of its preparation) and inoculated directly from the stock algal slope on nutrient agar. Then, the Chlorella strain was grown as a batch culture in a bubble column using the following culture parameters: temperature of 23° C.; medium pH 7.5-8.0; light intensity: 100 μmol·m⁻²·s⁻¹; light cycle: continuous. Biomass concentration, specific growth rate and biomass productivity of Chlorella were estimated daily. Typically, after 6 days of continuous growth the cultures reached biomass concentrations of approx. 1.2 g/L. The total crop volume of 20 L was collected for subsequent production scale-up to the HECTOR PBR.

### B. Production Scale-Up in a Semi-Industrial Photobioreactor (PBR)

[0532] The Chlorella cells were cultured further in a 170-Liter photobioreactor system (HECTOR). The inoculum was added to sterile BG11 medium to the total volume of 150 L and the cells were grown autotrophically as a semi-batch culture with bubble column mixing. The following culture parameters were used: temperature of 18±4° C.; medium pH 8.0±0.05; light intensity: 150-300 μmol m⁻²·s⁻¹; between 150 μmol·m⁻²·s⁻¹ the three first days of each batch, 250 μmol·m⁻²·s⁻¹ days four and five and 300 μmol·m⁻²·s⁻¹ days six and seven before the harvesting as light cycle: continuous, with gradual increase in light intensity.

[0533] Biomass concentration, growth rate and biomass productivity of Chlorella were estimated daily. On the 6^{th} day of the cultivation, at the biomass concentration of approx. 1.5 g/L Chlorella harvesting was performed.

### C. Production of 3 Consecutive Batches of Chlorella

[0534] The Chlorella production was performed in 3 semi-batches of 130 L, from which about 80% of the culture volume was aseptically removed for downstream treatment and supplemented with sterile BG11 medium. Following the harvest, the light intensity was lowered to 140 μmol m⁻²·s⁻¹ to avoid excessive photon intake. A seeding line was set up to go from 100 mL of culture to 150 L of culture. Three consecutive batches lasting 6-7 days were carried out with the aim of extracting a vesicle concentrate devoid of microalgae.

### Culture Parameters Monitoring

### 1. Determination of the Protein Content

[0535] The protein content of cultures was determined by elemental analysis, resorting to Vario el III (Vario EL, Elementar Analyser systeme, GmbH, Hanau, Germany), according to the procedure provided by the manufacturer. The final protein content was calculated by multiplying the percentage of nitrogen given by the elemental analysis by 6.25.

### 2. Estimation of Chlorophyll Content

[0536] Culture samples were centrifuged at 2547 g for 15 min using a Hermle centrifuge (HERMLE Labortechnik GmbH, Wehingen, Germany). Pigments were extracted from the resulting pellet by bead milling in acetone. The full absorbance spectrum of the extract was obtained with a Genesys™ 10S UV-VIS spectrophotometer (Thermo Fisher Scientific, Massachusetts, USA) and iteratively decomposed to the standard pigment spectra to obtain the total chlorophyll content.

### 3. Growth Estimation

[0537] Dry weight was obtained by filtration of culture samples using pre-weighed 0.7 μm GF/C 698 filters (VWR, Pennsylvania, USA) and dried at 120° C. until constant mass was obtained using a DBS 60-30 electronic moisture analyser (KERN & SOHN GmbH, Balingen, Germany). All dry weight samples were washed with demineralized water to remove growth medium salts.

### D. Isolation of Microalgae Extracellular Vesicles: Production of Concentrated MEV Preparation (Down-Stream Processing: Clarification and Concentration Step)

[0538] The culture harvested from the photobioreactor was centrifuged at 2,700 g for 5 minutes at room temperature for cell removal. The supernatant was transferred into fresh bottles and centrifuged again at 2,700 g for 5 minutes at room temperature. The clear MEV-containing solution was then subjected to membrane filtering using a 1.2 μm cut-off cartridge filter. The filtrate was concentrated with the use of a 100 kDa MWCO tangential filtration system. At each isolation step the material was analyzed spectrophotometrically for chlorophyll and particulate matter. Dry weight of the final product was <0.01 g/L and the concentration factor relative to the initial volume of the processed culture was approx. 20. The suspension of MEV thus obtained was stored at −50° C. in 1-1.2 L pockets for further purification.

### E. Purification of Chlorella Microalgae Extracellular Vesicles

[0539] 1. Thaw in a cold room at 4° C., overnight, the preparation of MEVs previously clarified, concentrated, and stored (1.0-1.2 L) as described in section D.
[0540] 2. When the preparation is thawed, harvest the biomass by centrifugation (set the temperature to 4° C.): 2×10000 g for 10 minutes at 4° C.
[0541] 3. Collect the supernatant (MEVs) and filter by vacuum filter onto 0.65 μm filters to get rid of the remaining cells.
[0542] 4. The MEVs are concentrated and purified by tangential flow filtration (TFF) using Sartorius VivaFlow® filtration systems.
   [0543] a. The membrane is washed by running water at ˜100 ml/minute, as described by the manufacturer. After that, the circuit is washed with cell-free medium (BG-11 medium) at ˜200 ml/minute (pressure reading at 2/2,5 bars).
   [0544] b. The MEV preparation (supernatant) is run in the circuit at ˜200 ml/minute (pressure reading at 2/2,5 bars).
   [0545] When the residual volume in the circuit plus the reservoir is about 200 mL, the TFF is used to diafiltrate and change the medium from BG-11 to PBS using 1L of PBS.
   [0546] c. When the residual volume in the circuit plus the reservoir is about 200 ml in PBS, slow the flow to ˜100 ml/minute (20 minutes, 1 bar).
   [0547] d. From 30-60 ml of residual volume, slow the flow to a speed lower than 50 ml/minutes and allow the MEVs in PBS to recirculate for 30 minutes to recover the particles trapped on the membrane surface.
   [0548] e. MEVs are then filtered using 0.45 μm filters and purified by ultracentrifugation.
   [0549] f. The filtered MEVs are loaded on the ultracentrifuge tubes and centrifuged for 1 h at 4° C., at 100000 g (27400 rpm) (acceleration and deceleration at 10 max), for example in a SorVall™ WX ultra 80 TST 28.38. Pellets containing the MEVs are resuspended in 1-2 ml of PBS buffer and sterilized by filtration using a 0.2 μm filter and analysed the particles by nanoparticle tracking analysis (NTA; dilute up to 1:1000 before the NTA analysis).

### F. Purification of Chlorella Microalgae Extracellular Vesicles by Size Exclusion Chromatography (SEC)

[0550] When higher purity of MEVs is needed, a last step of purification is added. The MEVs previously concentrated by TFF and purified by ultracentrifugation and formulated in PBS at concentration of 10Exp11 to 10Exp13 per mL are seeded in a pre-packed column qEV1 from IZON. The MEVs are eluted with PBS solution. The elution fractions of 0.5 mL are collected. MEVs are recovered in the first fractions as shown in FIG. 1.

[0551] MEV concentrations in the initial sample and in the fractions collected throughout the elution are evaluated with the ZetaView® engine (Nanoparticle Tracking Analyzer from Particle Metrix) as the quantity of proteins by Bradford assay. The most concentrated fractions (4-5) are pooled and stored at 4° C. before use. FIG. 1 shows purification of MEVs by Size Exclusion Chromatography.

### Example 2

### Characterization of the MEVs

### A. Nanoparticle Tracking Analysis (NTA)

[0552] MEVs were analyzed for size and dispersity (size distribution) using a NanoSight NS500 system (Malvern Panalytical Instruments). The instrument was equipped with a 488 nm laser, a high sensitivity sCMOS camera and a syringe pump. The MEV samples were diluted in particle-free PBS (0.02 μm filtered) to obtain a concentration within the recommended measurement range (1-10×10⁸ particles/mL), corresponding to dilutions of from 1/1000 to 1/10000 depending on the initial sample concentration.

[0553] For each sample, 5 experiment videos of 60 seconds duration were analyzed using NTA 3.4 Build 3.4.003 (camera level 15-16) with syringe pump speed 30. A total of 1500 frames were examined per sample, which were captured and analyzed by applying instrument-optimized settings using a suitable detection threshold so that the observed particles are marked with a red cross and that no more than 5 blue crosses are seen. Further settings were set to “automatic” and viscosity to “water.”

[0554] For the characterization of the MEVs, MEV samples are produced and purified as described in Example 1 as follows: MEV are clarified and concentrated by tangential flow filtration (TFF), diafiltration and ultracentrifugation, purified by SEC and sterilized by 0.22 μm filtration. After SEC purification and filtration, MEVs are diluted between 1,000 to 10,000 times in PBS (1×) and measured in the ZetaView® analyzer (Particle Metrix GmbH, Ammersee, Germany).

### B. Z Potential Measurement

[0555] The zeta potential of MEVs was measured three times at 25° C. under the following settings: sensitivity of 85, a shutter value of 70, and a frame rate of 30 frames per second, while ZetaView® software was used to collect and analyze the data. Table 1, below, shows the results of 3 independent measurements.

TABLE 1
Results of concentration, size, and Zeta potential measurements
for 3 representative samples of SEC-purified MEVs.

| Samples (MEVs | Concentration | MEVs Median | MEVs Zeta |
|---|---|---|---|
| After SEC) | (MEVs/mL) | size (nm) | potential (mV) |
| #1 | 2.9Exp12 | 159.9 | −20 |
| #2 | 2.9Exp12 | 163.6 | −22.58 |
| #3 | 2.9Exp12 | 161.7 | −22.3 |
| MEAN | 2.9Exp12 | 161.6 | −21.63 |
| SD | 5.7Exp8 | 2.6 | −2.3 |

### C. Transmission Electron Microscopy (TEM)

[0556] To verify the presence of intact MEVs, the preparations were analyzed using transmission electron microscopy (TEM). Fixed (4% formaldehyde, 0.2% glutaraldehyde) MEV samples were allowed to attach to Formvar/carbon-coated grids for 15-20 min, washed again with PBS followed by distilled water and finally stained with 0.4% uranyl acetate/1.8% methyl cellulose and then dried. The preparations were observed using a JEOL-JEM 1230 (JEOL Ltd., Tokyo, Japan) at 80 kV and images were acquired using a Morada digital camera and iTEM software (Olympus, Munster, Germany).

[0557] The TEM imaging, presented in FIG. 2, demonstrates that the MEVs are round shaped vesicles sized ˜50-250 nm in diameter. MEVs are enveloped in a single lipid bilayer membrane, their lumen had slightly higher electron density, and the thickness of the membrane was estimated as ˜5-10 nm, which matches the thickness of a plasma membrane. FIG. 2 shows exemplary images of MEVs obtained using Transmission Electron Microscopy (TEM).

### D. DiR Fluorescent Labelling

[0558] For uptake and internalization studies, and well as for further characterization in vivo, MEVs were labelled with DiR, a lipophilic carbocyanine derivative (1,1′-Dioctadecyl-3,3,3′,3′-Tetramethylindotricarbocyanine Iodide; Thermo Fisher Scientific) that has low fluorescence in water, but becomes highly fluorescent upon membrane incorporation, and diffuses laterally within the plasma membrane. Fresh samples of the P40 fraction (prepared as above) were re-suspended in 1 ml of BG11 culture medium. 5 μl of 1 mg/ml DiR solution was added to the samples, following incubation at 37° C. for 1 hour. Then, the samples were ultra-centrifuged at 100,000 g for 30 min using a Kontron TST 55.5 rotor at 28,100 rpm. The supernatant was removed, while the pellets were washed twice with 1 ml of PBS and centrifugation at 100,000 g for 30 min. Finally, the pellet was re-suspended in 1 ml of PBS. The DiR-labelled MEVs were stored at 4° C. and used promptly to ensure highest possible fluorescent intensity. DiR fluorescence of the labelled MEVs was measured using a SpectraMax® fluorescence microplate reader (Molecular Devices, USA) with excitation at 750 nm and emission at 780 nm.

### E. PKH26 Fluorescent Labelling

[0559] For uptake and internalization studies, and well as for further characterization in vivo, MEVs alternatively are labelled with PKH26 (Merck-Sigma), a fluorochrome in the red spectrum with peak excitation (551 nm) and emission (567 nm) that also can be excited by a 488 nm laser. MEVs fresh samples (prepared as described above) are re-suspended in 1 ml of Diluent C from the PKH26 kit. 6 μl of PKH26 dye is added to the samples, followed by continuous mixing for 30 seconds by gentle pipetting. After 5-minute incubation at room temperature, the samples are quenched by adding 2 ml of 10% BSA in 1×PBS. The volume is brought up to 8.5 ml in media and 1.5 ml of 0.971 M sucrose solution is added by pipetting slowly and carefully into the bottom of the tube, making sure not to create turbulence. The PKH26-labelled MEVs remain on top of a sucrose cushion. Then, the samples are ultra-centrifuged at 190,000 g for 2 hours at 2-8° C. using a Kontron TST 55.5 rotor. The supernatant is removed, while the pellets are washed with 1×PBS by gentle pipetting and centrifuged again at 100,000 g for 30 min, the pellet is re-suspended in 1 ml of 1×PBS. Alternatively labelled MEVs were purified from free dye by size exclusion chromatography using a qVE1/70 nm column (IC1-70—IZON Science) and washed with PBS. The MEVs were recovered in the first two fractions. The PKH26-labelled MEVs are stored at 4° C. and filtered with 0.45 μm filter before adding to cells. FIG. 3A shows the labelled MEVs with PKH26 by confocal microscopy.

### F. DiD Fluorescent Labelling

[0560] For uptake and internalization studies, MEVs alternatively are labelled with DiD (ThermoFisher Scientific), a fluorochrome in the red spectrum with peak excitation (650 nm) and emission (670 nm). MEVs fresh samples (prepared as described above) are re-suspended in 1 ml and incubated 2 μl of DiD dye added to the samples, followed by continuous mixing for 30 seconds by gentle pipetting. After 5-minute incubation at room temperature, the samples are quenched by adding 2 ml of 10% BSA in 1×PBS. The labelled MEVs were purified from free dye by size exclusion chromatography using a qVE1/70 nm column (Product Code: IC1-70, IZON Science) and washed with PBS. The MEVs were recovered in the first two fractions. The PKH26-labelled MEVs are stored at 4° C. and filtered with 0.45 μm filter before adding to cells. FIG. 3B shows the labelled MEVs with DiD by confocal microscopy.

[0561] MEVs were labelled with PKH-26 or DiD and visualized using LEICA SP5 confocal microscope using 63× objective. FIG. 3A shows MEVs labelled with PKH26 (excitation 546 nm). FIG. 3B: MEVs labelled with DiD (excitation 647 nm). FIGS. 4A-C show the uptake of PKH26-labelled MEVs into cells after 16 hours of incubation. The visualization using Zeiss® LSM8 confocal microscope using 63× objective. Hoechst (Nucleus): PKH26 (MEVs) FIG. 4A: cells uptake of MEVs (2D image). FIG. 4B: individual cell image (2D). FIG. 4C: individual cell image (3D).

### G. Flow Cytometry

[0562] Flow cytometry analyses were conducted using LSRII flow cytometer with CellQuest™ Pro software (BD Biosciences). Latex beads of 0.3 and 1.1 m diameters were prepared and used according to the manufacturer's recommendation to define the MEV gate. Since latex beads typically have higher refractive index and thus lower limits of size detection by flow cytometry than MEVs, the thresholds for forward and side scatter were adjusted to avoid background noise during acquisition. The predefined MEV gate was applied to all samples during analysis. FIG. 5 shows the cytometry analysis of labelled MEVs. FIGS. 6A-6B show the uptake of MEVs by different types of cells by cytometry.

[0563] FIG. 5 shows the distribution of MEVs labelled with lipophilic dyes by cytometry. The figure shows the DiR dye incorporated into MEV's membrane and the percentage of labelled-MEVs. FIGS. 6A and 6B show the high uptake of MEVs in different type of cells as percentage of fluorescence cells after the treatment with DiR-labelled-MEVs by cytometry.

### Example 3

Exogenous Loading of MEVs/Loading of Biomolecules into the MEVs
A. Passive and Surfactant-Assisted Loading of Biomolecules (e.g., Proteins, Peptides, siRNA, mRNA, Antisense Oligonucleotides (ASOs), Plasmids, Complexes) Using Plasmid DNA (pDNA) and GFP (Protein) as Exemplary Biomolecules

[0564] Purified MEVs, as described in Example 1, were diluted in PBS to a specific concentration (10\hat{ }8, 10\hat{ }9 or 10\hat{ }10). Next, different concentrations of cargos (0.2, 1 or 2 μg/ml for pDNA; 2 or 20 μg/ml for GFP) were added to the MEV suspension (total volume of 500-1000 μl) and incubated for 1 or 24 hours for pDNA and 0, 1 or 6 hours for GFP (passive loading). For surfactant-assisted loading, the mixture of MEVs and pDNA was supplemented with 0.2% or 0.5% of saponin and incubated at room temperature for 5 or 30 min, with or without an agitation at 700 rpm.

B. Freeze-Thaw Cycles Loading of Biomolecules (e.g., Proteins, Peptides, siRNA, mRNA, ASOs, Plasmids, Complexes) Using Plasmid DNA (pDNA), GFP (Protein) and mRNA (Encoding eGFP) as Exemplary Biomolecules

[0565] Purified MEVs, as described in Example 1, were diluted in PBS to a specific concentration (10\hat{ }8, 10\hat{ }9, 10\hat{ }10, 10\hat{ }11 and 10\hat{ }12). Next, various concentrations of cargos (0.2, 1, 2 or 40 μg/ml for pDNA; 0.2 and 2 μg/ml for mRNA) were added to the MEV suspension (total volume of 500 μl). The mixture of MEVs and the cargo was frozen at −80° C. or immersed into liquid nitrogen (−196° C.). Then the sample was thawed at 37° C. in a water bath. This freeze-thaw cycle was repeated 2 or 4 times for each sample.

C. Sonication Loading of Biomolecules (Proteins, Peptides, siRNA, mRNA, ASOs, Plasmids, Complexes) Using Plasmid DNA (pDNA), mRNA (Encoding eGFP) and GFP (Protein) as Exemplary Biomolecules

[0566] Purified MEVs, as described in Example 1, were diluted in PBS to a pre-determined concentration ((10\hat{ }8, 10\hat{ }9, 10\hat{ }10, 10\hat{ }11 and 10\hat{ }12 MEVS/mL). Next, various concentrations of cargos (0.2, 1, 2 or 20 μg/ml for pDNA; 2 and 20 μg/ml for mRNA; 2 or 20 μg/ml for GFP) were added to the MEV suspension (total volume of 500-1000 μl). The mixture of MEVs and the cargo was sonicated using Fisherbrand Model 50 Sonic Dismembrator (frequency: 20 kHz, wattage: 50 W). Before sonication, the signal amplitude was set to 20%, 40%, 50% or 60%. Each sample underwent a sonication for 30 seconds followed by a pause during 30 seconds on ice, or 4 seconds followed by a rest period of 120 seconds on ice. This cycle was repeated 2, 6 or 8 times for each sample.

D. Extrusion Loading of Biomolecules (e.g., Proteins, Peptides, siRNA, mRNA, ASOs, Plasmids, Complexes) Using Plasmid DNA (pDNA), mRNA and GFP as Exemplary Biomolecules

[0567] Purified MEVs, as described in Example 1, were diluted in PBS to a specific concentration (10\hat{ }10). Next, different concentrations of cargos (2 or 20 μg/ml for pDNA; 0.1, 1, 2 and 10 μg/ml for mRNA; 2 or 20 μg/ml for GFP) were added to the MEV suspension (total volume of 500-1000 μl). The mixture of MEVs and the cargo was extruded through a syringe-based hand-held mini-extruder (SKU: 610023-1 EA, Avanti® Polar Lipids). The sample was extruded from 10 to 15 times across a membrane filter with 100 nm diameter pores, using two facing syringes. In some experiments, the sample was extruded sequentially through a 200 nm, a 100 nm and 50 nm diameter pore membranes. The extrusion was performed at room temperature or at 65° C.

E. Sonication and Extrusion-Assisted Active Loading (SEAL) of Biomolecules (e.g., Proteins, Peptides, siRNA, mRNA, ASOs, Plasmids, Complexes) Loading mRNA and GFP as Exemplary Biomolecules

[0568] Purified MEVs, as described in Example 1, were diluted in PBS to a specific concentration (10\hat{ }11). Next, different concentrations of cargos (2 or 20 μg/ml for mRNA; 2 or 20 μg/ml for GFP) were added to the MEV suspension (total volume of 500-600 μl). The mixture of MEVs and the cargo was sonicated for 8 min (30 sec on/30 sec off, on ice) at 20% amplitude by a Fisherbrand™ Model 50 Sonic Dismembrator (frequency: 20 kHz, wattage: 50 W). Then the sonicated MEVs were further extruded with the cargo through 100 nm polycarbonate (PC) membranes for ten cycles at room temperature.

F. Electroporation of Biomolecules (e.g., Proteins, Peptides, siRNA, mRNA, ASOs, Plasmids, Complexes) Using Plasmid DNA (pDNA) and mRNA as Exemplary Biomolecules

[0569] Purified MEVs, as described in Example 1, were diluted in PBS to a specific concentration (10\hat{ }8, 10\hat{ }9 or 10\hat{ }10). Next, different concentrations of cargos (1, 2, 5, or 20 μg/ml for pDNA; 2 and 20 μg/ml for mRNA) were added to the MEV suspension (total volume of 110-150 μl). The mixture of MEVs and the cargo was transferred into a 100 μl electroporation cuvette and placed into a Super Electroporator NEPA 21 (NEPAGENE) device. The following parameters were set for each electroporation: the voltage (50 V, 100 V, or 200 V), the pulse length (5 ms, ms, or 15 ms), the pulse interval (set to 50 ms), the decay rate (set to 10%), the polarity (set to positive), the number of pulse (1, 9 or 15), and the presence or absence of a transfer pulse (5 pulses of 20 V during 50 ms with 50 ms interval and 10% decay rate). To assess aggregation, 20 mM of EDTA or 10 mM of citrate have been added before electroporation for each condition.

### G. DNase Treatment:

[0570] After each loading method, a part of the samples underwent a treatment with a Deoxyribonuclease I (DNase) (10104159001, Roche) to eliminate all free nucleic acids (non-encapsulated by the loading). The DNase and a DNase buffer (Tris-HCl 10 mM, MgCl₂ 2.5 mM, CaCl₂ 0.5 mM, pH 7.6) were mixed with the sample and incubated for 40 minutes in an incubator at 37° C. Finally, Ethylenediaminetetraacetic acid (EDTA) (20 mM) was added to inhibit DNase action. Samples then were stored at 4° C.

### H. RNase Treatment:

[0571] After each loading method, a portion of the samples were treated with Ribonuclease I (RNase) (EN0601, Thermo Scientific) to remove any free (non-encapsulated by the loading) ribonucleic acids. The RNase was mixed with the sample and incubated for 15 minutes in a 37° C. incubator. Finally, SUPERase-In (AM2694, Invitrogen), an RNAase inhibitor, was added to inhibit the action of RNase. The samples were then incubated for 4 hours in a 37° C. incubator. Finally, the samples were stored at 4° C.

### I. Proteinases Treatment

[0572] Where proteins or nucleic acid were the payload, and after each loading method, the samples were treated with benzonase (Product No. E1014, Merck-Sigma) or micrococcal nuclease (Product No. MO247S, New England Biolabs), for 30 minutes following supplier's conditions. Samples were purified by SEC using qVE1/70 nm (Product code: IC1-70, IZON Science). The samples then were incubated for 4 hours in a 37° C. incubator. The samples were stored at 4° C.

### J. Exo-Loading Efficiency

[0573] The efficiency of exo-loading of MEVs obtained, purified, characterized, loaded, and internalization of payload determined, as described herein, is shown in the following Table (Table 2). The efficiency of exo-loading using the different loading methods for different payloads is calculated using the parameters: (i) loading-efficacy, and/or (ii) loading capacity, or (iii) the percentage of loaded MEV.

TABLE 2
Results of MEV exo-loading studies with loading
efficiency and loading capacity evaluated for
specific payloads and different loading methods.

| | | Tested | Loading | Loading |
|---|---|---|---|---|
| Payload | Method | Conditions | Efficiency | Capacity |
| DNA | Incubation | 9 | (0) | (0) |
| (plasmids/ | Saponification | 12 | (+) | (++) |
| ASOs) | Freeze thaw cycle | 28 | (++) | (+++) |
| | Electroporation | 46 | (+++) | (+++) |
| | Sonication | 23 | (++) | (++) |
| | Extrusion | 25 | (+) | (+) |
| | Serial Extrusion | 12 | (+) | (+) |
| | SEAL | (−) | ND | ND |
| RNA | Incubation | (−) | ND | ND |
| (mRNA/ | Saponification | (−) | ND | ND |
| siRNA/ | Freeze thaw cycle | 6 | (++) | (++) |
| miRNA) | Electroporation | 12 | (++) | (++) |
| | Sonication | 6 | (++) | (++) |
| | Extrusion | 24 | (++) | (++) |
| | Serial Extrusion | 21 | (+++) | (+++) |
| | SEAL | 10 | (0) | (0) |
| Proteins | Incubation | 9 | (+) | (+) |
| (peptides/ | Saponification | 12 | (++) | (++) |
| GFP/other | Freeze thaw cycle | 12 | (++) | (++) |
| proteins) | Electroporation | 12 | (++) | (++) |
| | Sonication | 40 | (+++) | (+++) |
| | Extrusion | 14 | (++) | (++) |
| | Serial Extrusion | 14 | (++) | (++) |
| | SEAL | 15 | (++) | (++) |

Key: Loading (0) very low; (+) low; (++) acceptable; (+++) best results; ND not determined, where the parameters are as follows:

[0574] Internalized payload is the total amount of payload molecules (DNA, RNA, protein, or other molecules) measure into the MEVs after the loading reaction. The internalized payload is determined by a specific quantification method (such as qPCR, RT-qpCR, determination of proteins, and other), after the elimination of the remaining payload molecules in the loading reaction medium at the end of reaction by specific enzymatic, treatment, (such as DNAse, RNAse, protease, other).

[0575] Copy number of payloads: Number of copies of payload molecule (DNA or RNA) in the either initial amount or the internalized payload amount. The number of copies is obtained using the following calculation:

$$Number of copies = ( ng \times [ 6.022 Exp 23 ] ) / ( length \times [ 1 Exp 9 ] \times 650 )$$

[0576] ng is the number of nucleic acids (plasmid, RNA.)
[0577] 6.022Exp23 Avogadro's number.
[0578] Length is the length of the DNA fragment in base pairs multiply by 1000 (kb)
[0579] Multiply by I Exp9 to convert to nanograms, Loading efficiency is the percentage of the initial amount of payload molecule, in the loading reaction medium at the initial timepoint, internalized into extracellular vesicles from microalgae (MEVs).

[0580] Loading capacity is the copy number of payload internalized per MEV. The loading capacity calculated as the ratio between the internalized payload copies and the number of MEVs in the reaction.

[0581] As an example: if in a loading reaction are initially 3.6Exp10 copy of DNA and 1Exp9 MEVs, and by qPCR is determined that 7.8Exp9 copies of DNA are internalized into the MEVs. For this loading reaction the loading parameters are the following.

$$\begin{matrix}loading efficiency = ( 1.8 Exp 9 DNA copies / 3.6 Exp 10 DNA copies ) * 100 = 5 \% \\ loading capacity = 1.8 Exp 9 DNA copies / 1 Exp 9 MEV = 1.8 DNA copies / MEV .\end{matrix}$$

[0582] Percentage of loading MEVs: is the number of fluorescent MEV per total number of MEVs per 100. The fluorescence is determined using ZetaView® device at f90 and f95 are sensitivity values, Sensitivity values are expressed in arbitrary units ranges from 0 to 100. It represents the sensitivity of the camera sensor in the ZetaView© device. This sensitivity setting is comparable to the sensitivity setting of a camera used in digital photography. The number of detected particles in the field is associated to the sensitivity camera: increase of sensitivity->increase of the number of particles detected in each sample. Sensitivity is calibrated before the measurement based on the negative control chose the highest sensitivity for which no event is detectable,

### Example 4

### Endogenous-Loading of MEVs

[0583] Chlorella vulgaris engineering to generate producer cell lines carrying exogenous coding regions and endogenous loading of biomolecule cargo into the Microalgae Extracellular Vesicles (MEVs) is described in this Example.

A. Transformation Using a Tumor Inducing (Ti) Plasmid, and Agrobacterium tumefaciens to Generate Stable Chlorella Producer Cell Lines for Endogenous Loading of Biomolecules, Such as Proteins, Peptides, siRNA, mRNA, Complexes) into the MEVs

### 1. Chlorella Culture Conditions

[0584] Chlorella cells (Chlorella vulgaris UTEX 265, UTEX 395, and CCAP 211/19 from GEPEA, University of Nantes, France) are maintained in BG11, 1% agar plates and grown in BG11 liquid medium pH 7, in autotrophic conditions in growth chamber under the following conditions: i) temperature: 25° C.; ii) photoperiod:14 h/10 h; iii) light intensity:100 μmol m⁻²·s⁻¹.

### 2. Agrobacterium Strain and Vectors

[0585] The plasmid vectors used for Agrobacterium transformation are generated using the green gate assembly strategy (see, Lamproulos et al. (2013) J. PLoS One 8:e83043; PMID24376629). The gene specific or chimeric constructs are cloned in modules “B” or “D” and/or “B and D” according to the cloning strategy (coding or non-coding RNA) and assembled in expression plasmid constructs under the control of Cauliflower Mosaic Virus (CaMV) 35S promoter or other promoters known to those of skill in the art for expression in microalgae, including any described herein, such as those listed in the table in the detailed description, and a specific construct encoding a product of interest, and a resistance cassette (Hygromycin resistance gene or NPTII gene (neomycin phosphotransferase II). All chimeric constructs are obtained by simultaneous ligations of the different fragments into the “B” or “D” and/or “B and D” module. All plasmids are verified by restriction analysis, and Sanger sequencing.

[0586] The binary vector pCAMBIA1304 (cambia.org) encoding a GFP:gusA fusion reporter and a selectable marker for hygromycin B resistance driven by the CaMV 35S promoter is used for some transformations.

[0587] The Agrobacterium tumefaciens used for Chlorella transformations is a disarmed strain C58C1. Plasmids are introduced into A. tumefaciens by electroporation.

3. Transformation of Chlorella Cells with Agrobacterium tumefaciens

[0588] Chlorella cells (10⁸ cells) from an exponentially growing culture are plated on BG11 agar plates and kept under normal light for 5 days. For genetic transformation, A. tumefaciens carrying the appropriate plasmid vector is pre-inoculated the day before the transformation. The day of the transformation 5 mL of A. tumefaciens pre-inoculum is seeded in 50 mL LB medium and grown up to OD₆₀₀=around 1. At the defined optical density A. tumefaciens pre-inoculum is washed and resuspended in 200 μL induction medium (BG1 Imedium at pH 5.6 plus acetosyringone 100 μM). Chlorella cells are gently harvested from the plates and resuspended in the 200 μL of induction medium plus the A. tumefaciens and co-cultivated for 2 days in induction medium in dark. After the co-cultivation, the cells are harvested and put in BG11 medium pH 7 supplemented with cefotaxime and kept in dark for 2 days at 25° C. Finally, cells are harvested and plated onto BG11 agar plates supplemented with the relevant antibiotic according to the plasmid vector used for the transformation. Plates are kept in dark for 2 more days and then exposed to light. Around 2-3 weeks colonies are replicated on fresh BG11 agar plate containing relevant antibiotics. Resistant colonies are propagated on non-selective media and used for PCR analysis. Detection of contaminating Agrobacterium is performed by growing cells on LB agar plates for at least 7 days at 25° C. in the dark. The expression of the gusA reporter gene is confirmed by GUS histochemical assay, while visualization of GFP expression is performed using a fluorescent microscope (Leica DM Ire2, Wetzlar, Germany).

B. Transformation by Electroporation to Generate Stable Producer Cell Lines that Endogenously Load Biomolecules (e.g., Proteins, Peptides, RNAi, mRNA, Complexes) into the MEVs; GFP or RNAi Against Luciferase Coding Regions are Exemplary Biomolecules.

### 1. Chlorella Culture Conditions

[0589] Chlorella cells (Chlorella vulgaris UTEX 265, UTEX 395 and CCAP 211/19 from GEPEA, University of Nantes, France) are maintained in BG11, 1% agar plates and grown in BG11 liquid medium pH 7, in autotrophic conditions in growth chamber under the following conditions: i) temperature: 25° C.; ii) photoperiod: 14 h/10 h; iii) light intensity: 100 μmol m⁻²·s⁻¹.

### 2. Enzyme Digestion for Chlorella Cells to Prepare Protoplast

[0590] To prepare protoplasts, Chlorella cells are treated with an enzyme mixture containing 0.6 M sorbitol, 0.1% MES, 50 mM CaCl₂·2H₂O, 1.0 mg/mL lysozyme, 0.25 mg/mL chitinase, and 1.0 mg/mL sulfatase in 10 mL of sterile water. A total of 1×10⁷ cells 100 mL at early exponential growth phase are used for preparing protoplasts in 10 mL of the mixture solution. Cells are incubated at room temperature in the dark up to 24 h with gentle rotation at 25 rpm. Cells are harvested by centrifugation at 1350×g for 10 min. The viability of protoplasts after enzymatic treatment is about 7%.

### 3. Electroporation Conditions

[0591] Chlorella cells and Chlorella protoplasts, at a concentration of 10⁶ in 100 mL, are transformed at different conditions between 600V to 1500V pulse voltage with 3 to 5 ms pulse width and using 60 ng plasmid using a Bio-Rad Gene Pulser® X cell electroporation system. Electroporation is slightly modified from previously described methods (Bai et al. (2013) PLoS one 8:e54966, doi:10.1371/journal.pone.0054966; Run et al. (2016) Algal Res 17:196-201, doi:10.10.106/j.algal 2016.05.002; and Kumar et al. (2018) Journal of Applied Phycology 30:1735-1745, doi.org/10.1007/s10811-018-1396-3) as follows: 45 μL of pre-cooled osmotic buffer (0.2 M mannitol and 0.2 M sorbitol) is added for the suspension of the harvested cells (1350×g for 10 min) and then incubated for 40 min on ice. Again, 45 μL of pre-cooled electroporation buffer (0.2 M mannitol, 0.2 M sorbitol, 0.08 M KCl, 0.005 M CaCl₂, and 0.01 M Hepes; pH 7.2) is added in the suspension solution. 60 ng of plasmids of pCAMBIA1302 or pIT69 (in 10 mL) is added to the suspension cells immediately along with 1.5 g of sonicated salmon sperm DNA.

a. Screening

[0592] After electroporation, cells are kept on ice for 60 min, transferred to a 12-well plate containing 1.5 mL of BG11 medium, and cultured in the dark at 25° C. for 24 h. The cultured cells are harvested by centrifugation, suspended in 200 μL of BG11 medium, plated onto BG11 agar plates containing 20 g/mL hygromycin, and incubated in continuous fluorescent light with 60 μmol photons m⁻¹ s⁻¹ at 25° C.

[0593] Two weeks after transformation and plating, clones are picked and cultured in 96-well plates for 1 week with BG11 medium and cultured in the dark at 25° C. and 20 μg/mL hygromycin. Chlorella cells are then divided into two groups: 1) for PCR analysis and 2) to test ability to grow concentrations of hygromycin between 0 and 100 g/mL. Hygromycin resistance test of selected clones indicates that clones are obtained after transformation of Chlorella protoplasts under all of the electroporation conditions tested, strains and clones description: 265 (A1) is Chlorella vulgaris UTEX 265 strain, Ath1 to Ath7 are transformed clones obtained from Chlorella vulgaris UTEX 265 strain by electroporation, 395(K1) is Chlorella vulgaris UTEX 395 strain, Kth1 and Kth2 are transformed clones obtained from Chlorella vulgaris UTEX 395 strain by electroporation and Hr5 is a clone transformed from Chlorella vulgaris UTEX 265 strain obtained by Agrobacterium tumefaciens.

[0594] PCR analysis, of each of 20 clones obtained by electroporation from Chlorella vulgaris UTEX 265 strain, and 10 clones obtained by electroporation from Chlorella vulgaris UTEX 395 strain were tested and confirmed the integration of hygromycin phosphotransferase gene (hpt) at the molecular level. The efficiency of transformation by electroporation of both strains of Chlorella vulgaris tested was between 30-50%.

b. Clone Selection

[0595] PCR analysis, of each of 20 clones obtained by electroporation from Chlorella vulgaris UTEX 265 strain, and 10 clones obtained by electroporation from Chlorella vulgaris UTEX 395 strain were tested and confirmed the integration of hygromycin phosphotransferase gene (hpt) at the molecular level. The efficiency of transformation by electroporation of both strains of Chlorella vulgaris tested was between 30-50%.

C. Particle Gun Transformation to Generate Stable Producer Cell Lines for Endogenous Loading of Biomolecules (e.g., Proteins, Peptides, RNAi, mRNA, Complexes) into the MEVs Using Gfp or RNAi Against Luciferase Coding Regions as Exemplary Biomolecules.
Transformation of Chlorella vulgaris Cells Using Gun Microparticles Method

[0596] Chlorella vulgaris cells (1×10⁸) are collected from exponentially growing liquid cultures in BG-11 medium and spread on 10 cm 1% BG-11 agar plates containing. Two hours later, transformations are carried out using the microparticle bombardment method (Biolistic PDS-1000/Particle Delivery System (BioRad)) adapted from Apt and collaborators (see reference) with minor modifications. In brief, gold particles (particle diameter of 0.6 μm, BioRad) are coated with DNA using 1.25 M CaCl₂ and 20 mM spermidine. Agar plates Chlorella cells to be transformed are positioned at 7.5 cm from the stopping screen within the bombardment chamber. A burst pressure of 1,550 psi and a vacuum of 25 Hg are used. For the experiments, 5 μg of each plasmid encoding hygromycin resistance gene (pIT069) or not (p¹6604) are used as negative control. Five bombardments are performed using each DNA.

### D. Cloning, Selection, and Screening of Transformed Clones (Producer Cell Lines).

### 1. Cloning and Selection of Transformed Clones

[0597] Two days post-transformation, bombarded cells are spread with 50 μg/ml or 100 μg/ml of hygromycin on the agar plates and placed in the incubator under a 12 h light:12 h dark cycle for at least 3 weeks. Chlorella colonies appear about 2 weeks after transformation by bombardment. Chlorella colonies are cultured either in 50 μg/ml (A) or 100 μg/ml (B) of hygromycin. After 2 weeks, colonies are visible on the plate with cells that contain and express the hygromycin resistance gene, and not visible on the plates containing the negative control. Colonies are observed on plates on which the cells that express the hygromycin resistance gene (pIT0609) are cultured. Negative control (p16604) clones do not grow in the presence of hygromycin.

[0598] For subcloning, colonies from transformations are re-suspended in BG-11 culture medium and plated at a low density (600 cells on a 10 cm agar plate containing hygromycin antibiotic), providing for the isolation of subclones 2-3 weeks later.

### 2. Chlorella Genomic DNA Extraction

[0599] Genomic DNA is extracted from exponentially growing cultures using a NucleoSpin® DNA protocol. Genomic DNA (gDNA) concentration is measured using a QuBit fluorometer.

### 3. PCR Analysis of Transformants

[0600] Direct PCR colony analysis on gDNA is performed by collecting a little bit of the colony to be analyzed (use a pipette tip or an inoculation tool or a toothpick) and resuspending it in 20 μl of HS5 buffer (125 mM NaOH, 1 mM EDTA, 0.1% Tween 20). After 20 s of vortexing at max speed, the samples are incubated for 10-15 minutes at RT and boiled at 95° C. for 10-15 s. Next, 100 μl of H₂O is added, mixed well and briefly centrifuged to spin down the debris. 1-5 μl are used as a template for PCR reaction. The plasmid used for the transformation is the positive control; wild-type gDNA served as the negative control.

[0601] PCR analysis is performed in a 25 μL reaction containing 150 ng DNA, 1.25 mM dNTP, 2 mM MgCl₂, 1.25 μM of each primer and 1 U OneTaq® DNA polymerase. The primers used to amplify a 650 bp fragment of the hygromycin resistance gene are Hygro 1: 5′-AGCGTCTCCGACCTGATG-3′ (SEQ ID NO:259) and Hygro 2: 5′-CGACGGACGACTGACGG-3′; (SEQ ID NO:260). Amplification is carried out in a thermal cycler (Eppendorf). The amplification of hygromycin resistance gene shows the expected 650 bp fragment in all positive clones (i.e., growing in BG-11 plus 50 mg/mL hygromycin).

### E. Storage of Chlorella Modified Producer Cell Lines.

Cryopreservation of Chlorella vulgaris Cells

[0602] Two conditions of cryopreservation and storage of isolated cells from Chlorella vulgaris in exponential growing state and in stationary state are evaluated. The first condition corresponds to the standard method recommended by UTEX collection using 10% methanol as a cryoprotective agent in BG-11 medium and the second condition using 25% glycerol in BG-11 medium as routinely used for animal cell lines.

[0603] Both cryo-storage conditions are evaluated in exponential growing phase (4-5×10⁶ cells) or stationary phase (3-5×10⁷ cells). After congelation, the cells are thawed at 37° C. Cell viability is determined in BG-11 medium for 5 days (liquid medium) or BG-11 solid medium (stria) for 15 days culture. Viability is determined after one or two cycles of freezing/thawing at 3 days and 30 days (one cycle) or 30, 60, 180 days (two cycles).

[0604] A higher viability and a better reproducibility of the results is obtained with the 25% of glycerol in BG-11 medium (freezing medium), with Chlorella cells in exponential growing phase and a dilution of 100 mL of cryomedium in 5 mL BG-11 medium liquid culture as thawing culture conditions.

F. Determination of the Genetic Stability of Chlorella Producer Cell Lines. PCR Detection of Chlorella Transformants

[0605] Genomic DNA from transformed and wild-type (WT) Chlorella strains is isolated from exponentially growing cultures using NucleoSpin® DNA protocol. Genomic DNA concentration is measured using a QuBit fluorometer. PCR analysis is performed to detect the presence of the hygromycin resistance gene using specific primers as described above or firefly luciferase primers: f-LUC1—5′-CCAGGGATTTCAGTCGATGT-3′(SEQ ID NO: 261) and f-LUC2—5′-AATCTCACGCAGGCAGTTCT-3′ (SEQ ID NO: 262); or GFP (SEQ ID NO:263 and 264) or eGFP (SEQ ID NOs:265 and 266) or mCherry (SEQ ID NOs:267 and 268) or GUS (SEQ ID NOs: 269 and 270) as described below.

G. Transformation by Multisequence Pulses Electroporation to Generate Stable Producer Cell Lines that Endogenously Load Biomolecules (e.g., Proteins, Peptides, RNAi, mRNA, Complexes) into the MEVs; eGFP (Modified Codon or not) or fLUC (Modified Codon or not) or RNAi Against Luciferase Coding Regions are Exemplary Biomolecules.

[0606] A highly efficient multisequence pulses method was optimized to transform Chlorella vulgaris cells; with the objective of generating stable producer cell lines and to obtain MEVs endo-loaded (with tailored mRNA, proteins, or siRNAs) by the microalgae. The multisequence pulses method generates, first, pores in the wall and membranes and, second, pulses the offered DNA into the cells.

### 1. Generation of Plasmid Vectors

[0607] For the generation of Chlorella vulgaris producer cell lines a series of plasmids (SEQ NOs.:271-318) constructs were obtained using the Green-Gate system combining: 12 different promoters-enhancers, and 2 marker proteins eGFP and fly fire luciferase, the cDNAs for each of the two proteins was cloned in plasmid vectors using mammalian codons or Chlorella codons (different GC %), and 2 antibiotic resistance genes in order to obtain Chlorella producer cell lines and RNAi against fLUC. The constructs are verified by sequencing the complete region of interest, from the promoter of the transgene to the poly-A of the antibiotic resistance gene.

[0608] Table 3 shows a compilation of the constructs tested by multiple sequence pulses electroporation aiming at the transformation of Chlorella vulgaris to generate cells lines producers of MEVs endo-loaded with tailored mRNAs, proteins, or RNAi.

TABLE 3

| plasmid | | promoter | | | Resistance | Seq |
|---|---|---|---|---|---|---|
| name # | promoter | type | CDS | Terminator | Gene | ID # |
| pAGS - | EF 2 | constitutive | FLUC | RBCS | Hygromycin | 271 |
| 0001 | (Phaeodactylum | | modified | | | |
| | tricornutum) | | codon to | | | |
| | | | Chlorella GC | | | |
| | | | content | | | |
| pAGS - | Histone 4 | constitutive | FLUC | RBCS | Hygromycin | 272 |
| 0002 | (Penicillium | | modified | | | |
| | funiculosum) | | codon to | | | |
| | | | Chlorella GC | | | |
| | | | content | | | |
| pAGS - | Lhcf.1 | inducible | FLUC | RBCS | Hygromycin | 273 |
| 0003 | (Phaeodactylum) | (light) | modified | | | |
| | | | codon to | | | |
| | | | Chlorella GC | | | |
| | | | content | | | |
| pAGS - | Ubi.U4 | constitutive | FLUC | RBCS | Hygromycin | 274 |
| 0004 | (Nicotiana | | modified | | | |
| | tabacum) | | codon to | | | |
| | | | Chlorella GC | | | |
| | | | content | | | |
| pAGS - | CAM 35S | constitutive | FLUC | RBCS | Hygromycin | 275 |
| 0005 | (Cauliflower | | modified | | | |
| | mosaic virus) | | codon to | | | |
| | | | Chlorella GC | | | |
| | | | content | | | |
| pAGS - | MAS | constitutive | FLUC | RBCS | Hygromycin | 276 |
| 0006 | (Agrobacterium | | modified | | | |
| | tumefaciens) | | codon to | | | |
| | | | Chlorella GC | | | |
| | | | content | | | |
| pAGS - | PAR | inducible | FLUC | RBCS | Hygromycin | 277 |
| 0007 | (Arabidopsis | (light) | modified | | | |
| | thaliana) | | codon to | | | |
| | | | Chlorella GC | | | |
| | | | content | | | |
| pAGS - | CV PAS D | inducible | FLUC | RBCS | Hygromycin | 278 |
| 0008 | (Chlorella | (light and | modified | | | |
| | vulgaris) | stress) | codon to | | | |
| | | | Chlorella GC | | | |
| | | | content | | | |
| pAGS - | CMV | constitutive | FLUC | RBCS | Hygromycin | 279 |
| 0009 | | | modified | | | |
| | | | codon to | | | |
| | | | Chlorella GC | | | |
| | | | content | | | |
| pAGS - | CMV + | constitutive | FLUC | RBCS | Hygromycin | 280 |
| 0010 | enhancer | | modified | | | |
| | | | codon to | | | |
| | | | Chlorella GC | | | |
| | | | content | | | |
| pAGS - | SV40 | constitutive | FLUC | RBCS | Hygromycin | 281 |
| 0011 | | | modified | | | |
| | | | codon to | | | |
| | | | Chlorella GC | | | |
| | | | content | | | |
| pAGS - | SV40 + | constitutive | FLUC | RBCS | Hygromycin | 282 |
| 0012 | enhancer | | modified | | | |
| | | | codon to | | | |
| | | | Chlorella GC | | | |
| | | | content | | | |
| pAGS - | EF 2 | constitutive | eGFP | RBCS | Hygromycin | 283 |
| 0013 | (Phaeodactylum | | modified | | | |
| | tricornutum) | | codon to | | | |
| | | | Chlorella GC | | | |
| | | | content | | | |
| pAGS - | Histone 4 | constitutive | eGFP | RBCS | Hygromycin | 284 |
| 0014 | (Penicillium | | modified | | | |
| | funiculosum) | | codon to | | | |
| | | | Chlorella GC | | | |
| | | | content | | | |
| pAGS - | Lhcf. 1 | inducible | eGFP | RBCS | Hygromycin | 285 |
| 0015 | (Phaeodactylum) | (light) | modified | | | |
| | | | codon to | | | |
| | | | Chlorella GC | | | |
| | | | content | | | |
| pAGS - | Ubi.U4 | constitutive | eGFP | RBCS | Hygromycin | 286 |
| 0016 | (Nicotiana | | modified | | | |
| | tabacum) | | codon to | | | |
| | | | Chlorella GC | | | |
| | | | content | | | |
| pAGS - | CAM 35S | constitutive | eGFP | RBCS | Hygromycin | 287 |
| 0017 | (Cauliflower | | modified | | | |
| | mosaic virus) | | codon to | | | |
| | | | Chlorella GC | | | |
| | | | content | | | |
| pAGS - | MAS | constitutive | eGFP | RBCS | Hygromycin | 288 |
| 0018 | (Agrobacterium | | modified | | | |
| | tumefaciens) | | codon to | | | |
| | | | Chlorella GC | | | |
| | | | content | | | |
| pAGS - | PAR | inducible | eGFP | RBCS | Hygromycin | 289 |
| 0019 | (Arabidopsis | (light) | modified | | | |
| | thaliana) | | codon to | | | |
| | | | Chlorella GC | | | |
| | | | content | | | |
| pAGS - | CV PASD | inducible | eGFP | RBCS | Hygromycin | 290 |
| 0020 | (Chlorella | (light and | modified | | | |
| | vulgaris) | stress) | codon to | | | |
| | | | Chlorella GC | | | |
| | | | content | | | |
| pAGS - | CMV | constitutive | eGFP | RBCS | Hygromycin | 291 |
| 0021 | | | modified | | | |
| | | | codon to | | | |
| | | | Chlorella GC | | | |
| | | | content | | | |
| pAGS - | CMV + | constitutive | eGFP | RBCS | Hygromycin | 292 |
| 0022 | enhancer | | modified | | | |
| | | | codon to | | | |
| | | | Chlorella GC | | | |
| | | | content | | | |
| pAGS - | SV40 | constitutive | eGFP | RBCS | Hygromycin | 293 |
| 0023 | | | modified | | | |
| | | | codon to | | | |
| | | | Chlorella GC | | | |
| | | | content | | | |
| pAGS - | SV40 + | constitutive | eGFP | RBCS | Hygromycin | 294 |
| 0024 | enhancer | | modified | | | |
| | | | codon to | | | |
| | | | Chlorella GC | | | |
| | | | content | | | |
| pAGS - | EF 2 | constitutive | eGFP non | RBCS | Hygromycin | 295 |
| 0025 | (Phaeodactylum | | modified | | | |
| | tricornutum) | | sequence | | | |
| pAGS - | Histone 4 | constitutive | eGFP non | RBCS | Hygromycin | 296 |
| 0026 | (Penicillium | | modified | | | |
| | funiculosum) | | sequence | | | |
| pAGS - | Lhcf. 1 | inducible | eGFP non | RBCS | Hygromycin | 297 |
| 0027 | (Phaeodactylum) | (light) | modified | | | |
| | | | sequence | | | |
| pAGS - | Ubi.u4 | constitutive | eGFP non | RBCS | Hygromycin | 298 |
| 0028 | (Nicotiana | | modified | | | |
| | tabacum) | | sequence | | | |
| pAGS - | CAM 35S | constitutive | eGFP non | RBCS | Hygromycin | 299 |
| 0029 | (Cauliflower | | modified | | | |
| | mosaic virus) | | sequence | | | |
| pAGS - | MAS | constitutive | eGFP non | RBCS | Hygromycin | 300 |
| 0030 | (Agrobacterium | | modified | | | |
| | tumefaciens) | | sequence | | | |
| pAGS - | PAR | inducible | eGFP non | RBCS | Hygromycin | 301 |
| 0031 | (Arabidopsis | (light) | modified | | | |
| | thaliana) | | sequence | | | |
| pAGS - | CV PAS D | inducible | eGFP non | RBCS | Hygromycin | 302 |
| 0032 | (Chlorella | (light and | modified | | | |
| | vulgaris) | stress) | sequence | | | |
| pAGS - | CMV | constitutive | eGFP non | RBCS | Hygromycin | 303 |
| 0033 | | | modified | | | |
| | | | sequence | | | |
| pAGS - | CMV + | constitutive | eGFP non | RBCS | Hygromycin | 304 |
| 0034 | enhancer | | modified | | | |
| | | | sequence | | | |
| pAGS - | SV40 | constitutive | eGFP non | RBCS | Hygromycin | 305 |
| 0035 | | | modified | | | |
| | | | sequence | | | |
| pAGS - | SV40 + | constitutive | eGFP non | RBCS | Hygromycin | 306 |
| 0036 | enhancer | | modified | | | |
| | | | sequence | | | |
| pAGS - | EF 2 | constitutive | FLUC non | RBCS | Hygromycin | 307 |
| 0037 | (Phaeodactylum | | modified | | | |
| | tricornutum) | | sequence | | | |
| pAGS - | Histone 4 | constitutive | FLUC non | RBCS | Hygromycin | 308 |
| 0038 | (Penicillium | | modified | | | |
| | funiculosum) | | sequence | | | |
| pAGS - | Lhcf.1 | inducible | FLUC non | RBCS | Hygromycin | 309 |
| 0039 | (Phaeodactylum) | (light) | modified | | | |
| | | | sequence | | | |
| pAGS - | Ubi.U4 | constitutive | FLUC non | RBCS | Hygromycin | 310 |
| 0040 | (Nicotiana | | modified | | | |
| | tabacum) | | sequence | | | |
| pAGS | CAM 35S | constitutive | FLUC non | RBCS | Hygromycin | 311 |
| 0041 | (Cauliflower | | modified | | | |
| | mosaic virus) | | sequence | | | |
| pAGS - | MAS | constitutive | FLUC non | RBCS | Hygromycin | 312 |
| 0042 | (Agrobacterium | | modified | | | |
| | tumefaciens) | | sequence | | | |
| pAGS- | PAR | inducible | FLUC non | RBCS | Hygromycin | 313 |
| 0043 | (Arabidopsis | (light) | modified | | | |
| | thaliana) | | sequence | | | |
| pAGS - | CV PAS D | inducible | FLUC non | RBCS | Hygromycin | 314 |
| 0044 | (Chlorella | (light and | modified | | | |
| | vulgaris) | stress) | sequence | | | |
| pAGS - | CMV | constitutive | FLUC non | RBCS | Hygromycin | 315 |
| 0045 | | | modified | | | |
| | | | sequence | | | |
| pAGS - | CMV + | constitutive | FLUC non | RBCS | Hygromycin | 316 |
| 0046 | enhancer | | modified | | | |
| | | | sequence | | | |
| pAGS - | SV40 | constitutive | FLUC non | RBCS | Hygromycin | 317 |
| 0047 | | | modified | | | |
| | | | sequence | | | |
| pAGS - | SV40 + | constitutive | FLUC non | RBCS | Hygromycin | 318 |
| 0048 | enhancer | | modified | | | |
| | | | sequence | | | |

### 2. Transformation by Multisequence Pulses

[0609] Cells of Chlorella vulgaris in the phase of exponential growth are electroporated using Nepa21 Type II Electroporator (Nepagene), as follows: after determination of the number of cells/mL, an aliquot of ten million cells per aliquot are placed in separate 1.5 mL Eppendorf® tubes (one tube per transformation condition) in 100 μL of BG-11 media plus 0.7 M of mannitol; 6 μg (in 20 μL at maximum) of linearized plasmids are added to the cell suspensions. The preparations are homogenized by tapping the tubes, then placed into electroporation chambers of 2 mm of diameter (Product No. EC002S, Sonidel) and electroporated. The conditions of electroporation are described in Table 4.

TABLE 4A
Conditions for poring Chlorella cells
First Sequence: Poring Pulses

| | Pulse Time | Interval between | Pulse | Decay | |
|---|---|---|---|---|---|
| Voltage | (ms) | Pulses (ms) | Number | Rate % | Polarity |
| 300 | 5 | 50 | 7 | 10 | non |

TABLE 4B
Conditions for transferring DNA into Chlorella cells
Second Sequence: Transferring Pulses

| | Pulse Time | Interval between | Pulse | Decay | |
|---|---|---|---|---|---|
| Voltage | (ms) | Pulses (ms) | Number | Rate % | Polarity |
| 8 | 50 | 50 | 5 | 40 | non |

[0610] After transformation, Chlorella cells are diluted in 4 mL BG-11 media+0.7M mannitol in T25 flasks. Cells are incubated in a refrigerated incubator, at 25° C. overnight, protected from light. The next day, they are resuspended using a sterile pipette, and transferred into 15 mL Falcon tubes. Cells are centrifuged 5 min at 700 g, the supernatant removed and resuspended in 200 μL of BG-11 media. The total volume (200 μL) of each cell suspension is plated on Agar/BG-11 agar plates (+70 μg/mL hygromycin or kanamycin according to the plasmid vector used for transformation) and incubated in the refrigerated incubator at 25° C., for 12 hours light/12 hours dark (12L/12D). Clones were visible at day 10 and are harvested for PCR screening at day 15.

### 3. Clone Screening

[0611] For each transformation, 5 to 10 clones are picked and cultured in BG-11 medium containing an antibiotic (either 40-70 mg/mL of Hygromycin or 70-100 mg/mL of Kanamycin). After 10 days of culture clones are tested to identify positive clones, and in parallel frozen for banking. Positive clones are identified by PCR using the corresponding primers in the following list, that match the coding regions of either the resistance gene or the transgene, or the promoter region of the vector. Screening is performed by either multiplex or simplex PCR analysis. The number of positive clones obtained after the multiple sequence pulses is an average of 4 out of 10 clones picked.

[0612] After screening, 24 positive clones of Chlorella producer cell lines are produced MEVs are collected and semi-purified as described in the Example above. Semi purified MEVs are tested to verify the presence of a payload via the endo-loading, as described below in Example 5.

### Example 5

### MEV Characterization Following Loading a Biomolecule Cargo

### A. DNA Extraction:

[0613] QIAprep® Spin Miniprep Kit (acquired from QIAGEN) was used to extract nucleic acid encapsulated by the MEVs according to the manufacturer's recommendations. At the end of the protocol, nucleic acids were eluted in 50 μL of nuclease-free water.

### B. RNA Extraction:

[0614] The RNeasy® Micro Kit (50) (acquired from QIAGEN) was used to extract the ribonucleic acid encapsulated by the MEVs according to the manufacturer's recommendations. At the end of the protocol, the nucleic acids were eluted in 14 μL of nuclease-free water.

### C. Reverse Transcription:

[0615] RNA was isolated from loading methods of MEVs with CleanCap® mRNA coding for eGFP (Tebu-bio) (to which 50 ng of an RNA (mCherry (Tebu-bio)) has been added) by the single-step purification method with RNeasy® Micro Kit (ref No. 74004, Qiagen GmbH, Germany) described by the manufacturer's protocol (Qiagen-RNeasy Micro Handbook). At the end of the protocol, the nucleic acids were eluted in 14 μL of nuclease-free water.

[0616] Reverse transcription and real-time PCR: Quantitative RT-PCR (RT-Q-PCR) was performed as follows: 4 μl of extracted total RNA was reverse transcribed using SuperScript™ II Reverse Transcriptase (Thermo Fisher Scientific cat. No. 18064-071, manufacturer's protocol: Part no. 18064.pps, MAN0001342) in a 16 μL reaction volume (constituted with hexamer random primer, dNTP Mix, Buffer, DTT, pure RNA, SuperScript™ II RT and RNaseOUT™). The reaction was mixed by very gentle pipetting to ensure that all reagents were thoroughly mixed. After mixing Hexamer Random primer, dNTP Mix, RNA and water, samples were spun down and incubated for 5 minutes at 65° C., put on ice and finally incubated 12 minutes at 25° C. where buffer, DTT, RNaseOUT™ and SuperScript™ II RT were added. Next the reaction was incubated at 42° C. for 50 min. For the last step of the mRNA reverse transcription protocol, the Reverse Transcriptase was heat-inactivated for 15 minutes at 70° C. The obtained volume of cDNA after RT was 16 μl.

[0617] After the RT reaction, 56 μl of H₂O were added to the sample to obtain in total a 72 μl cDNA starting solution per sample. Before Real-time PCR measurements, the needed dilution factor of the 72 μl cDNA starting solution was determined via prescreening experiments as X1000. Defining the right dilution factor ensures that the measured Cq output values will have values between 20 and 30. This Cq 20-30 range assures better linearity and avoids the signal's noise region which is expected to start at Cqs higher than 30.

D. qPCR:

[0618] To quantify the plasmid extracted from the MEVs, analysis by quantitative Polymerase Chain Reaction (qPCR) have been performed. DNA concentration was measured in the samples using a NanoDrop™ 2000 analyzer (acquired from ThermoScientific) and the samples were diluted if necessary to be correctly amplified during the qPCR (volumes for each condition are listed in annexes). A plasmid range was realized from 0.4×10⁻⁶ ng to 5.1×10⁻⁶ ng of pDNA. A master mix was prepared with 5 μL of PowerUp™ SYBR™ Green per well (Cat. No. A25776, from Fisher Scientific™ Applied Biosystems™), 0.5 μL of forward primer per well (concentration=10 μM), and 0.5 μL of reverse primer per well (concentration=10 μM). Primers complementary of the resistance gene sequence of the pDNA have been previously designed to amplify only the plasmid of interest. A MicroAmp™ Optical 384-Well reaction plate (Cat. No. 10411785, from Fisher Scientific™, Applied Biosystems™) was used, 6 μL of master mix were put in each well, followed by 4 μL of the sample. Two negative controls were made: nuclease-free water with SYBR™ green dye, and nuclease-free water with SYBR™ green dye and primers. All conditions were done in duplicates. The plate was sealed and briefly centrifuged. The thermocycler was a CFX384 Touch™ Real Time PCR detection system (from Bio-Rad). The three-step cycling, followed by the melt curve protocols are summarized in the tables 5 and 6 below.

TABLE 5
Three-step cycling protocol for qPCR

| | Temperature | | Number of |
|---|---|---|---|
| Step | (° C.) | Time | cycles |
| Dual lock DNA polymerase | 95 | 10 minutes | 1 |
| Denaturation | 95 | 15 seconds | 40 |
| Annealing | 60 | 1 minute | |

TABLE 6
Melt curve protocol for qPCR

| Step | Ramp rate | Temperature (° C.) | Time |
|---|---|---|---|
| 1 | 1.6° C./second | 95 | 15 seconds |
| 2 | 1.6° C./second | 60 | 1 minute |
| 3 | 0.15° C./second | 95 | 15 seconds |

[0619] For RNA detection after real-time (RT) qPCR was performed in technical duplicates in qPCR plates with a rapid thermal cycler system (LightCycler® 480 II, 384 (well)). The protocol was the following: 3 μl cDNA (with defined dilution factor of X1000 were mixed with one forward and one reverse primer (added at optimized concentrations usually between 200 nM and 1.0 μM), mix Takyon® No ROX SYBR 2× MasterMix blue dTTP (Eurogentec, UF-NSMT-B0701) with dNTPs, MgCl₂, Taq DNA polymerase and buffer, constituting a volume of 10 μl in total. Then, this mix was placed in LightCycler® plates.

[0620] The amplification protocol started with an initial incubation at 95° C. for 10 min (serving for activation of Taq DNA polymerase), followed by 45 amplification cycles composed of two steps: step I) a 95° C. denaturation for 10 s, step II) 60° C. primer annealing and extension for 40 seconds, (the detection of the fluorescent product was performed at the end of this 60° C. extension period with a single acquisition mode). The amplification protocol is followed by the step to perform the melting curve with one cycle of 95° C. denaturation for 5 seconds, 60° C. annealing for seconds, and a 95° C. end point (achieved by a temperature raise with a ramp rate of 0.04° C./s from 60° C. to 95° C. and accompanied by continuous detection of the fluorescent product). The amplification protocol ended by cooling at 37° C. for 10 seconds.

[0621] For plasmid quantification (dilution by 1000), the same protocol (mix and cycles) of the LightCycler® instrument is used as with cDNA quantification. Only the primers are modified.

[0622] The qPCR's primers and their concentrations are listed below:

RNA Primers (SEQ ID NOs: 265 and 266):
eGfP(1-1)For3
AGCAAAGACCCCAACGAGA
eGfP(1-1)Rev3
TCGTCCATGCCGAGAGTG
eGfP(1-1) For3Rev3:
400 nM
RNA reference Primers (SEQ ID NOs: 267 and 268):
mCherry(1-1)F1:
GACCACCTACAAGGCCAAGA
mCherry(1-1)R1:
CCGCTCGTACTGCTCCAC
mCherry(1-1) FR1:
500 nM
Plasmid (pDNA) pcDNA3.1+ Primers (SEQ ID NOs: 319 and 320):
Left primer PCDNA3.1 + 1:
GACCACCAAGCGAAACATGG
Right primer PCDNA3.1 + 1:
CCATGGGTCACGACGAGATC
PCDNA3.1 LR1(Left primer PCDNA3.1 + 1, Right primer PCDNA3.1 + 1):
700 nM

### Controls for RT-qPCR Assays

[0623] To confirm the correct functioning of the RT-qPCR analysis, two different controls were included in the experiments: a negative control and an efficacy and quantification control. All two controls were applied on each qPCR plate.

[0624] One negative control, which was an RNA-free sample (H₂O only), was added to each qPCR plate and mixed with the according primers on the qPCR plate. This negative H₂O control allowed the estimation of the Cq background levels for each amplicon, that hybridizing primers create. Efficacy and quantification controls were employed on each qPCR plate to control the primers' annealing efficacies at different cDNA concentrations and quantified.

[0625] For the “RNA efficacy and quantification control” sample, a mix of CleanCap® mRNA coding for eGFP was prepared. Subsequently, 9 different concentrations (to which 50 ng of an RNA (mCherry (Tebu-bio)) has been added) were prepared with RNAse/DNase free water (1000 ng, 500 ng, 100 ng, 50 ng, 10 ng, ng, 1 ng, 0.5 ng, 0.1 ng), extracted, reverse transcribed, and then diluted (identically as the samples, dilution factor of X1000) and mixed with the according primers used on a qPCR plate. Efficacy and quantification controls were employed on each qPCR plate to control the primers' annealing efficacies at different DNA concentrations and quantified.

[0626] For the “DNA efficacy and quantification control” sample, a mix of Plasmid (pDNA) pcDNA3.1⁺ was prepared. Subsequently, 9 different concentrations were prepared with RNAse/DNase-free water (1000 ng, 500 ng, 100 ng, 50 ng, 10 ng, 5 ng, 1 ng, 0.5 ng, 0.1 ng), extracted and diluted (identically as the samples, dilution factor of X1000) and mixed with the according primers used on a qPCR plate.

### E. Fluorescence Readout by ZetaView® Nanoparticle Tracking Analysis (NTA) Instrument.

[0627] ZetaView® NTA instrument (engine) from Particle Metrix is a Nanoparticle Tracking Analysis engine for measuring hydrodynamic particle size, zeta potential, concentration, and fluorescence. It was calibrated before the experiment according to the manufacturer's recommendations with polystyrene beads. The PBS used for the day's experiments was evaluated with the ZetaView® engine (normal average number of particles on screen in PBS: 0-5). Samples were diluted with PBS to be measured by ZetaView® within the manufacturer's recommended reading range (50-200 particles per frame). Dilutions were made in PBS, then the sample was vortexed and placed in a 1 mL syringe for the analysis.

[0628] The samples were analyzed with ZetaView® engine in scatter mode (laser 488 nm) to determine the number and size distribution of the particles. The samples were then analyzed with the ZetaView® engine in fluorescence using a laser at 488 nm and a fluorescence filter at 500 nm at different percentages of sensitivity (95% or 90%). The analog view of the ZetaView® engine was activated during the fluorescence analysis to visualize the background noise.

F. Quantification of the siRNA Cargo

[0629] The cargo-loaded MEVs were lysed as above. Next, the siRNA cargo was detected using Quant-iT® PicoGreen® Assay kit (from Life Technologies), which is able to quantify nucleic acids with picogram sensitivity. Briefly, 100 μL of dye reagent working solution was added to 100 μL of each sample to make final volume of 200 μL. A control sample prepared in the same buffer contained 10 μmol of siRNA alone. Samples were transferred into black-walled clear bottom non-treated polystyrene 96-well plates and incubated in the dark for 10 min at room temperature. The sample fluorescence was measured using a SpectraMax® fluorescence microplate reader (from Molecular Devices, USA) with excitation at 480 nm and emission at 520 nm.

### G. Quantification of Total Proteins

[0630] Total proteins were quantified by BCA or Bradford test.

### H. Statistical Analysis:

[0631] Screening and optimized experimental designs were generated with NemrodW software. The results have been analyzed using R Studio (1.4.1717 version) and Prism (8.3 version). Significance of the variables compared to the controls was evaluated with unpaired parametric t tests. “ns” stands for “not significant” meaning a p-value superior to 0.05, “*” stands for a p-value inferior to 0.05, “**” stands for a p-value inferior to 0.01, and “***” stands for a p-value inferior to 0.001. Loading efficiency were calculated based on the pDNA quantity obtained by qPCR compared to the initial pDNA quantity for each condition. Linear regression modeling was realized to evaluate the effect of tested variables on plasmid encapsulation.

### Example 6A

### Biodistribution Studies

### In Vivo Biodistribution of MEVs

[0632] Experiments were performed to determine the pathway and fate of MEVs when administered via various routes.

### 1. MEV Labelling Using DiR Fluorescent Lipophilic Tracer

[0633] As described in example 2, the fluorescent, lipophilic carbocyanine DiR (1,1-dioctadecyl-3,3,3,3-tetramethylindotricarbocyanine iodide) is weakly fluorescent in water but highly fluorescent and photostable when incorporated into membranes and can be tracked in vivo (see, Example 2 above; ThermoFisher Scientific). The DiR labelled (MEVs) are incubated with human cells. Their uptake by human cells is measured by fluorimetry analysis (fluorescence spectroscopy) on microplate readers. DiR has an excitation of 750 nm and an emission of 780 nm.

[0634] The methodology for the biodistribution studies is summarized as follows: Chlorella cells were grown in the photobioreactor as described above (120L per batch), were isolated and labeled with DiR, and labelling efficiency was assessed as described in Examples 1 and 2.

### 2. Biodistribution of MEVs in Mice

[0635] The labeled MEVs were administered to the mouse model animals via one of four routes, via: intranasal, intratracheal, oral, and intravenous administration, to determine the pathways and fate of the MEVs by each route. Treated mice were subjected to full body imaging as a function of time, and at day 3 mice were sacrificed and the organs were imaged ex vivo, and by histology in several mice organs after different routes of application.

### Animal Model

[0636] MEVs' pharmacokinetics and biodistribution were studied in Specific Pathogen Free (SPF), 7-week-old male Balb/cByJ mice (Charles River Laboratories). The animals were labelled with unique ear ID tags and acclimatized for at least 2 days. Background (control) mice were housed individually, while MEV-treated mice were housed collectively in disposable standard cages in ventilated racks at 21±3° C. (temperature recorded and controlled) with a 12 hr-12 hr light/dark cycle. Filtered water and low fluorescence laboratory food for rodents were provided ad libitum. All mice were euthanized at the end of the in vivo experiments.

[0637] Prior to the imaging, the fur of each animal was clipped using an electric clipper in the following areas: abdomen, thorax, head, and whole back. Care was taken in order to clip the fur as homogeneously as possible. Next, DiR-labelled MEV preparations were re-suspended by vortexing before filling the syringes for injection.

### Routes of Administration

[0638] The following routes were used to administer the MEVs to the animals: Intravenous (IV): 50 μL of MEV suspension containing 0.6×10¹² MEV/mL were injected in a tail vein by disposable plastic syringe and appropriate needle. Dosage of MEV administered: 3×10¹⁰ MEV/mouse.

[0639] Intranasal (IN): Animals were induced and maintained under anesthesia during IN administration by a mixture of isoflurane and oxygen as a carrier gas. A volume of 100 μL of MEV suspension containing 0.3×10¹² MEVs/mL was administered into the nostrils of the mouse using a thin pipette cone. Dosage of MEV administered: 3×10¹⁰ MEV/mouse.

[0640] Per os (PO): 100 μL of MEV suspension containing 0.3×10¹² MEVs/mL was administered orally using a disposable plastic syringe and an appropriate feeding probe. Dosage of MEV administered: 3×10¹⁰ MEV/mouse.

[0641] Intratracheal (IT): Animals were induced and maintained under anesthesia during IT administration by a mixture of isoflurane and oxygen as a carrier gas. Once adequate anesthesia was observed, animals were placed on a mouse intubation platform, suspended from the front incisors in the supine position, to maximize view of the trachea. Then, a cold light was placed on the skin near the trachea localization in order to backlight the trachea. If needed, a laryngoscope was inserted to guide the syringe of Microsprayer® sprayer into the trachea. An injection of 50 L of MEV suspension containing 0.6×10¹² MEVs/mL was instilled into the trachea. Anesthesia was maintained throughout the procedure. After injection, the mice were maintained in the same position on the intubating platform for at least 30 seconds, before being replaced in their cage. Dosage of MEVs administered: 3×10¹⁰ MEV/mouse.

### In Vivo Imaging for Biodistribution Studies

[0642] Fluorescence acquisitions were performed with the IVIS® Spectrum optical imaging system (acquired from PerkinElmer). Bidimensional (2D) fluorescence imaging was performed by sensitive detection of light emitted by DiR-labelled MEVs. Mice were anesthetized and imaged 1 hour before MEV administration. Next, fluorescence of the material to be administered was confirmed with an in vitro acquisition performed on at least 1 drop of a minimum of 20 μL of MEV suspensions, deposited in 2 different Petri dishes. The fluorescence emission was measured and detected with the selected parameters (see below). Finally, in vivo fluorescence acquisitions were performed on mice administered MEVs. The animals were induced and maintained under anesthesia with a mixture of isoflurane and oxygen. Mice were positioned in dorsal recumbency to obtain ventral images and in ventral recumbency to obtain dorsal images. At least 2 acquisitions/mouse/timepoint were taken and mice were imaged in groups of maximum 3 mice/acquisition. Images were analyzed and fluorescence quantified on 6 organs (liver, spleen, lung, kidney, intestine, and brain).

[0643] The following timepoints were used (T0=MEV administration):
[0644] Day 0-6 time points: T0-1 h±10 min; T0+30 min 5 min; T0+2 h±15 min; T0+4 h±30 min; T0+8 h±30 min; T0+10 h±30 min
[0645] Day 1—1 timepoint: T0±24 h 3 h
[0646] Day 2—1 timepoint: T0±48 h 3 h
[0647] Day 3—1 timepoint: T0±72 h±3 h

[0648] The data were analyzed with the IVIS software (Living Image Software for IVIS).

[0649] The following parameters were used for the in vivo and ex-vivo fluorescence acquisitions:
[0650] Field of View (FOV) 14×14 cm (FOV C)
[0651] Image number: In vivo: For each mouse at each applicable timepoint, at least 2 acquisitions (ventral and dorsal) were performed; 3 mice (at maximum) were imaged in one acquisition.
[0652] Ex-vivo: the organs of at least one mouse were imaged in one acquisition
[0653] Image format—TIFF format
[0654] Fluorescent probe—DiR
[0655] Excitation wavelength—745 nm
[0656] Emission wavelength—800 nm
[0657] Exposition time—Automatic, depending on the fluorescence signal detected
[0658] Minimum counts—20,000
[0659] Binning—Between 16 and 1 (depending on the fluorescence signal detected)
[0660] F/STOP—2 (if fluorescence signal reached saturation, it was automatically increased to 4, or if signal was too weak, it was decreased to 1)
[0661] Subject height—In vivo: 1.5 cm
[0662] Ex-vivo: 0.5 cm

### Ex Vivo Imaging for Biodistribution Studies

[0663] Production, purification, characterization, labelling and administration (by different routes) of MEVs was as described above. On Day 3 after administration, mice were euthanized and the organs of interest of each mouse were sampled and positioned in a Petri dish in order to perform ex vivo acquisitions. The following organs were sampled: liver, spleen, lungs, kidneys, brain, and intestine. The data were analyzed with the IVIS software (Living Image Software for IVIS). FIG. 7 shows representative patterns of biodistribution according to the route of administration, for the Intravenous (IV), Intratracheal (IT) and Per os (PO) routes.

### Pharmacokinetics Results by Each Route of Administration

[0664] The pharmacokinetic curves demonstrating the accumulation as a percent of baseline over time (hours) after intravenous, Per os, intranasal, and intratracheal administration are set forth in FIGS. 8A-8D, respectively.

a. Intravenous Administration (FIG. 8A)
[0665] Organs targeted by unmodified MEVs—liver and spleen
[0666] PK parameters:
   [0667] Peak/plateau time: 2-24 h (liver), 4-24 h (spleen)
   [0668] % at t=day 3 compared to peak/plateau approximately 62% (liver), approx. 61% (spleen)
[0669] Longer presence or duration compared to mammalian EVs (see, e.g., Kang et al., Biodistribution of extracellular vesicles following administration into animals: A systematic review. J Extracell Vesicles. 2021; 10:e12085. (doi.org 10.10021jev2.12085)).
[0670] No visible signs of toxicity
   b. Per Os (Oral) Administration (FIG. 8B)
[0671] Organs targeted by following oral administration: intestine and spleen
[0672] Oral availability:
   [0673] MEVs are orally available; they resist the passage through the stomach, reach the intestine and subsequently appear in the spleen.
   [0674] Mammalian EVs are not orally available, with the exception of bovine milk EVs.
   [0675] Feasibility of MEV-based oral vaccines due to ability to reach intestinal tissue with per os route.
[0676] PK parameters:
   [0677] Peak/plateau time: 1-6 h (intestine), 1-10 h (spleen)
   [0678] % at t=10 h compared to peak/plateau: approx. 33% (intestine), approx. 44% (spleen)
   [0679] % at t=48 h compared to peak/plateau: 0% (intestine), 0% (spleen)
[0680] No visible signs of toxicity
   c. Distribution in Organs Following Intravenous and Oral Administration.

[0681] Liver: Following intravenous administration, the liver is the primary target organ. Following oral administration, the liver is marginally targeted, if at all. This indicates that MEV clearance by liver following per os delivery is low or none.

[0682] Spleen: The pharmacokinetics profile depends on whether administration is intravenous or oral (per os). Intravenous administration is longer lasting. At day 3, 50-70% of the peak is still remaining. Oral administration is shorter lasting; at 48 hours, 0% remains.

d. Intranasal Administration (FIG. 8C) Organs Targeted by the Unmodified MEVs are the Lungs
[0683] Preliminary PK parameters:
   [0684] Peak/plateau time: 4-28 h
   [0685] % at t=day 3 compared to peak/plateau: 70-80%
[0686] No visible signs of toxicity e. Intratracheal administration (FIG. 8D)
[0687] Organs targeted by the MEVs are the lungs
   [0688] PK parameters:
   [0689] Peak/plateau time: 2-72 h
   [0690] % at t=day 3 compared to peak/plateau: approx. 80%
   [0691] No visible signs of toxicity

### Example 6B

Biodistribution of MEVs Labelled with PK1126 after Per Os (PO) Administration in BALB/cByJ Mouse. Internalization of Fluorescently Labelled MEVs in the Mouse Intestinal Epithelium (Enterocytes), GALT Cells after Per Os Administration

[0692] PKH26 is a lipophilic fluorescent dye used for general membrane labeling. It is used for in vitro studies, as well as long term in vivo experiments due to enhanced stability (in vivo half-life is over 100 days). MEVs were labeled with PKH26 as described above and administered orally to BALB/c mice at a dose of 4×10exp10 MEV particles per animal. Between 0.5 to 24 hours post-administration, the animals were sacrificed, and the intestine was harvested.

### A. Organ Sampling and Processing: Intestine

[0693] The jejunum and ileum were gently rinsed with a cold PBS solution. Then, a piece of approximately 0.5 to 1 cm of jejunum and ileum were snap-frozen and lastly, each piece was longitudinally placed on bottom of the cryomold for OCT inclusion (as described below).

### B. Snap-Frozen:

[0694] A small stainless-steel bowl was placed in the bottom of a container containing dry ice in pellet form and liquid nitrogen. Then, isopentane/2-methylbutane was slowly added in the container. When, the dry ice pellets stop bubbling vigorously or/and the isopentane start to become opaque, the isopentane/2-methylbutane is at optimal temperature. Organs were gently immerged in isopentane/2-methylbutane and then placed in cassette (one cassette with each section of liver, the spleen and the piece of jejunum and one cassette with the piece of ileum only). Then, cassettes were stored at ≤−75° C. until OCT inclusion.

### C. OCT Inclusion Protocol

[0695] A small stainless-steel bowl was placed in the bottom of a container containing dry ice in pellet form and liquid nitrogen. Some pellets of dry ice were also placed directly in the bowl. Then, isopentane/2-methylbutane was slowly added in the container. When, the dry ice pellets stop bubbling vigorously and/or the isopentane starts to become opaque, the isopentane/2-methylbutane is at optimal temperature. The frozen tissue samples were then placed and oriented as mentioned above for each organ in the cryomold. The tissues were gently pushed with forceps to ensure that the bottom of surface of the tissue is placed properly (touching the face of the bottom, center in the mold and properly oriented). The cryomold with frozen tissue samples were placed on the surface of the cold isopentane/2-methylbutane. Optimal cutting temperature compound (OCT compound) was carefully deposited onto the specimen until it is completely covered. After hardening of the OCT compound (between 30 seconds and 1 minute), the OCT embedded block was placed in a bag (such as zip freezer bag). The frozen blocks were temporarily stored in dry ice. Then, slices of 5 μm were performed with a cryostat then glued on untreated slides for the histology and on treated slides for the immunochemistry.

### D. HES Staining

[0696] The HES staining allowed the observation of the morphology and the structure of tissues. After fixation in acetone, sections were immersed successively in solutions of Harris hematoxylin, eosin and saffron. After dehydration, sections were mounted between slide and cover slip using Entellan® mounting medium. Cytoplasm appeared in pink and nuclei in violet blue. Extracellular matrix was stained in yellow to pink.

### E. PKH26 Dye

[0697] Accumulation of fluorescent labeled MEVs was visualized by a LSM700 laser scanning confocal microscope (from Zeiss) and images were processed with LSM Image Browser. DAPI (4′,6-diamidino-2-phenylindole) [Invitrogen, Ref S36938] was used as nuclear counterstain prior to the imaging. Sections were mounted with aqueous medium with DAPI for fluorescent slide scanner observation (maximum 10 days after collection).

[0698] When MEVs are orally administrated to the mice, they follow through the digestive tract. MEVs first reach the stomach, where they resist the stringent conditions of the gastric juice. In about 30 minutes after administration, they reach the intestine, where they stay for several hours. Results are shown in FIGS. 9-11.

[0699] Once in the lumen of the intestine, as predictable from the Example 6, MEVs are internalized by the cells of the intestinal epithelium, or enterocytes (FIG. 9). MEVs also pass through the epithelial layer into the GALT (FIGS. 10A-10B). The GALT is a lymphoid structure associated to the digestive tract (gut-associated lymphoid tissues) located beneath the intestinal epithelium. It is located at specific spots along the intestine. GALT is a dense tissue composed of germinal centers with B and T lymphocytes, plasmocytes and innate immune cells including dendritic cells and macrophages. In the intestine, fluorescence is observed mostly in the GALT. Involvement of the GALT cells are relevant to oral vaccination, as it may be triggering the immune reaction via the antigen-presenting components of the cellular population. Fluorescence appears (FIG. 10B) concentrated in discrete spots around nucleus meaning that MEVs are localized in the plasma of cells occupying all the space in the plasma. This allows revealing of the shape of cells. Cells with MEVs inside correspond to histiocytes (resident macrophages) or dendritic cells, respectively, and are located mainly at the periphery of GALT and in the center of the GALT. No visible MEVs appear in the liver at all times evaluated (30 min to 24 h). A few hours after administration, dendritic/macrophage cells with MEVs inside move from the GALT to the spleen and stay in the spleen for several hours. MEVs primarily reach the red pulp (blood cells and some Th and B cells) are and in a lesser extent the white pulp of the spleen (lymphoid cells) (see FIG. 11A).

[0700] In the spleen, fluorescence is visible in several areas corresponding to the white and to the red pulps. The intensity of the fluorescence decreases in a gradient from the red pulps to the white pulps. Fluorescence is detected in spots inside the cell's cytoplasm. Cells with MEVs inside are round or reticular and have similar size; they may respectively be histiocytes (or tissue resident-macrophages) and/or dendritic cells.

[0701] Our first conclusion is that labelled-MEVs can be detected in the cytoplasm of mononuclear cells (tissue resident macrophages (histiocytes) and dendritic cells) in the GALT and in the spleen.

[0702] Importantly, MEVs reach the spleen directly, via GALT, dendritic cells and macrophages, without going per se into the systemic circulation. Cells can move from the GALT into the bloodstream directly or they can join it after they have first passed through the lymph stream. GALT cells carrying MEVs inside eventually arrived at the liver by the portal vein and/or by mesenteric lymphoid nodes and then to the systemic circulation. In both cases, however, MEVs, are ‘invisible’ to the liver as they have been internalized by GALT cells that naturally transport them to the spleen (see FIG. 11B).

[0703] Our second conclusion is that, therefore, the MEVs administered orally are not captured by the liver, as are the MEVs that have been administered intravenously. This is advantageous for MEVs that carry cargo, such as antigens or nucleic acid encoding antigens and/or immune modulators, intended for the immune system.

[0704] Our third conclusion, as shown by these results, is that following the oral administration, the ‘absorption’ of MEVs in the intestine (1) does not affect the general morphology of cells or tissues where MEVs have been internalized, including the intestinal epithelium, the GALT, and a few hours later the spleen; and (2) does not induce any inflammatory reaction. In situ IFH analysis of the biodistribution of labelled MEVs (labelled with pKH26 fluorescent dye) following oral administration shows the detection of fluorescence from 8 h to 24 h in all the intestinal epithelium, the GALT, and the spleen. In addition, after oral administration, MEVs are not observed in the liver at all, and they do not seem to travel systemically in a free form (but inside the cells from the GALT that have internalized them in the intestine).

[0705] Our fourth conclusion from these results is that MEVs can solve one of the problems facing the development of mucosal vaccines: the delivery of antigens through the mucosa. Therefore, MEVs are a suitable vaccine delivery system (VDS) to elicit a mucosal response by oral administration.

### Example 7

### MEV-Mediated In Vivo Delivery, Expression and Biologic Activity of Luciferase Enzyme and Luciferase-mRNA

A. Intra-Tracheal Administration of MEVs Loaded with Luciferase mRNA or Luciferase Protein

[0706] In vivo bioluminescence was used to study the biodistribution and MEV-mediated delivery and expression of luciferase mRNA and luciferase protein. Eight (8) female BALB/cByJ mice were divided into two groups (4 animals per group) for intra-tracheal (IT) administration. Mice in each group were treated either with MEVs loaded with mRNA encoding luciferase (MEV-luc mRNA) or MEVs loaded with luciferase enzyme (MEV-luc protein). MEVs were loaded and characterized as described above. For the IT administration, the animals were maintained under isoflurane-induced anesthesia and placed on a mouse intubation platform. Then, the trachea was backlit with a cold light and 50 μL/mouse of MEV formulations were administered intra-tracheally using a Microsprayer® aerosolizer (Penn-Century). After administration, mice were maintained in the same position on the intubating platform for at least 30 s before being replaced in their cage. A background mouse also was included in the study; this mouse did not receive any MEV administration and served as a control to measure the background level of the bioluminescence acquisition.

### B. Bioluminescence Acquisition

[0707] Prior to imaging, the fur of each animal was shaved on the abdomen and thoracic area using an electric clipper. Each mouse was intraperitoneally (IP) injected with 200 μL of luciferin solution at a concentration of 16.5 mg/mL. Bioluminescence acquisitions were performed 10 minutes after the luciferin injection, with mice anesthetized with a mix of isoflurane/oxygen. Animals were positioned in dorsal recumbency (ventral images) to visualize the mice abdomen and thorax and particularly the lungs, liver, intestine, and spleen. Bioluminescence acquisition in vivo was performed with the IVIS® LUMINA X5 optical imaging system (PerkinElmer). The bioluminescence was measured at 6 timepoints: 1 h before MEV administration and 6, 30, 48, 54 and 72 h post-administration. The bioluminescence signal was visualized and quantified in the lungs, liver, intestine, and spleen. Animals were euthanized after the last bioluminescence acquisition. At each timepoint, bioluminescence acquisitions were first performed on the background mouse to measure the background flux level corresponding to the auto-bioluminescence of mice and the noise emitted by the camera of the optical imaging system. Bioluminescence acquisitions then were performed on the experimental mice.

C. Results: Delivery of Luciferase mRNA, Protein Expression and Luciferase Activity In Vivo

[0708] FIG. 12 shows whole-body bioluminescence imaging of a representative animal treated with MEVs loaded with luciferase mRNA. MEV-mediated delivery of mRNA resulted in expression of enzymatically active luciferase in mouse tissues, as evidenced by the luminescence signal detected after the administration of luciferin. The target organs after intratracheal administration include the respiratory system (lungs and naso-buccal epithelium), as well as the gastrointestinal tract (intestinal epithelium) resulting from partial regurgitation of the MEV formulation. Luciferase activity after a single administration of MEVs was detectable starting from 6 hours post-administration and lasted for 2-3 days. The control was a background mouse with no MEV administration.

### D. Results: Luciferase Delivery and Activity In Vivo

[0709] FIG. 13 depicts whole-body bioluminescence imaging of a representative animal treated with MEVs loaded with luciferase enzyme. MEV-mediated delivery of the protein resulted in enzymatic activity of luciferase in mouse tissues, as evidenced by the luminescence signal detected after the administration of luciferin. The target organs after intratracheal administration include the respiratory system (lungs and naso-buccal epithelium), as well as the gastrointestinal tract (intestinal epithelium) resulting from partial regurgitation of the MEV formulation. Luciferase activity after a single administration of MEVs was detectable starting from 6 hours post-administration and lasted for 3-4 days. The control is a background mouse with no MEV administration. The results demonstrate that MEVs are able to deliver intact payload, including cargoes of degradation-sensitive enzymatic activity and extremely labile mRNA molecules. Therefore, MEVs allow for delivery and expression of payloads in the intestinal epithelial cells. This further demonstrates the potential of using MEVs to reach to the intestinal wall and deliver orally formulated vaccines.

[0710] Following oral administration of MEVs loaded with the luciferase protein or with luciferase-mRNA reach the intestine and enter the intestinal epithelial cells in vivo. A similar observation has been made in vitro with FHs-74 Int cells and with FHC cells, which are human embryonic epithelial cells from small intestine and from colon, respectively). After penetration the payload is released and either the protein, or the mRNA translate in protein are active and the biological activity of luciferase was well detected. These results shown, also the availability of MEVs as VDS for different modalities of payloads (proteins, mRNAs, and others).

### Example 8

Assessment of the Capacity of Extracellular Vesicles from Microalgae (MEVs) as a Protein Vaccine Delivery System Following Intramuscular (IM) Administration

### A. In Vivo Study in Healthy C57BL/6J Mice.

[0711] Animals were divided in groups (6 mice per group) and treated with the following:
[0712] Group 1: IM administered with OVA (Ovalbumin) in adjuvant (Complete Freund Adjuvant (CFA) on Day 0 or Incomplete Freund Adjuvant (IFA) on Day 21) on Days 0 and 21,
[0713] Group 2: IM administered with MEV-OVA on Days 0 and 21,
[0714] Group 3: IM administered with adjuvant only (CFA on Day 0 and IFA on Day 21) on Days 0 and 21,
[0715] Group 4: IM administered with MEV only on Days 0 and 21,
[0716] Group 5: IM administered with OVA (Ovalbumin) in adjuvant (Complete Freund Adjuvant (CFA) on Day 40 or Incomplete Freund Adjuvant (IFA) on Day 61) on Days 40 and 61.
[0717] Group 6: IM administered with MEV-OVA on Days 40 and 61.
[0718] Group 7: Control group; mock administration

[0719] Mice of groups 1-4 and 7 were euthanized on Day 43 after the first vaccinal administration. Mice of groups 5-6 were euthanized on Day 82 after the first vaccinal administration.

[0720] Whole blood was sampled just before euthanasia to collect serum for quantification of anti-OVA antibody by Enzyme-Linked Immunosorbent Assay (ELISA), and to perform flow cytometry as defined below.

[0721] Just after euthanasia, spleen, and inguinal and iliac lymph nodes (LNs) were collected and processed to perform flow cytometry analysis to quantify the T cell activation after in vitro stimulation with OVA peptides.

### B. Immunization Material and Mice Treatment:

### 1. Group 1: OVA in Adjuvant

[0722] On Day 0

[0723] OVA was dissolved in sterile water to obtain a solution concentrated at 0.1 mg/mL. 300 μL of OVA solution was thoroughly mixed with 300 μL of CFA (well homogenized by vortexing) in two 1 mL luer-lock syringes connected through the luer fitting to the 3-way valve. The thick white emulsion of OVA in adjuvant was used to treat the mice of Group 1.

[0724] On Day 21:

[0725] OVA was dissolved in sterile water to obtain a solution concentrated at 0.1 mg/mL. 300 μL of OVA solution was thoroughly mixed with 300 μL of IFA (well homogenized by vortexing) in two 1 mL luer-lock syringes connected through the luer fitting to the 3-way valve. The thick white emulsion of OVA in adjuvant was used to treat the mice of Group 1.

2. Group 2: MEVs Loaded with OVA

[0726] On Days 0, and 21:

[0727] MEVs were produced, purified, and characterized as described in Example land 2. MEVs were loaded with ovalbumin as described in the above Examples. MEV-OVA were vigorously mixed by vortexing for about 60 seconds and used to treat the mice of Group 2.

### 3. Group 3: Adjuvants (Complete Freud Adjuvant (CFA) or Incomplete Freud Adjuvant (IFA)

[0728] On Day 0:

[0729] CFA was well homogenized by vortexing and used to treat the mice of Group 3.

[0730] On Day 21:

[0731] IFA are well homogenized by vortexing and used to treat the mice of Group 3.

### 4. Group 4: MEVs (Non-Loaded)

[0732] On Days 0, and 21:

[0733] MEVs were produced, purified, and characterized as described in Example 1 and 2. Non-loaded MEVs were vigorously mixed by vortexing for about 60 seconds and used to treat the mice of Group 4.

### 5. Group 5: OVA in Adjuvant

[0734] On Day 0:

[0735] OVA was dissolved in sterile water to obtain a solution concentrated at 0.2 mg/mL. 300 μL of OVA solution was thoroughly mixed with 300 μL of CFA (well homogenized by vortexing) in two 1 mL luer-lock syringes connected through the luer fitting to the 3-way valve. The thick white emulsion of OVA in adjuvant was used to treat the mice of Group 5.

[0736] On Day 21:

[0737] OVA was dissolved in sterile water to obtain a solution concentrated at 0.2 mg/mL. 300 μL of OVA solution was thoroughly mixed with 300 μL of IFA (well homogenized by vortexing) in two 1 mL luer-lock syringes connected through the luer fitting to the 3-way valve. The thick white emulsion of OVA in adjuvant was used to treat the mice of Group 5.

6. Group 6: MEVs Loaded with OVA

[0738] On Days 40, and 61:

[0739] MEVs were produced, purified, and characterized as described in Examples 1 and 2. MEVs were loaded with ovalbumin as described in the above Examples. MEV-OVA were vigorously mixed by vortexing for about 60 seconds and used to treat the mice of Group 6.

### C. Intramuscular Administration

[0740] IM injections were performed into the right quadriceps using a disposable plastic syringe and an appropriate needle.

[0741] On Day 0 and Day 21:
[0742] Group 1 was IM administered with 100 μL of an emulsion of OVA (50 mg/100 mL) in adjuvant (CFA on Day 0 and IFA on Day 21),
[0743] Group 2 was IM administered with 100 μL of MEV-OVA at a concentration of 4¹⁰ particles/mL,
[0744] Group 3 was IM administered with 100 μL of adjuvant (CFA on Day 0 and IFA on Day 21),
[0745] Group 4 was IM administered with 40 μL of MEV at a concentration of 1·2¹¹ particles/mL,
[0746] Group 5 was IM administered with 100 μL of an emulsion of OVA i (100 mg/100 mL) in adjuvant (CFA on Day 0 and IFA on Day 21),
[0747] Group 6 was IM administered with 100 μL of MEV-OVA at a concentration of 4¹¹ particles/mL.

### D. Blood Sampling and Serum Collection

[0748] According to the experimental schedule, at 43 or 82 days after first IM administration in groups 1-4 or groups 5-6 respectively, whole blood (WB) was collected by retro-orbital sinus or intracardiac puncture under anesthesia.
[0749] 1—Whole Blood sampling for flow cytometry acquisitions:
[0750] About 300 μL of WB were collected and deposited in microtube previously heparinized (60 μL of heparin) to avoid coagulation.
[0751] 2—WB sampling for serum collection:
[0752] Minimum of 300 μL of WB were sampled and deposited in a Serum Separation Tube (SST) in order to obtain a minimum of 150 μL of serum. The SST were kept at room temperature until clotting and centrifuged at 3000 g for 10 minutes at room temperature. Serum aliquots were stored at <−75° C. until processing for quantification of anti-OVA antibodies by ELISA.

### E. Animal Euthanasia and Organs Sampling and Processing

[0753] According to the experimental schedule, at 43 or 82 days after first IM administration groups 1-4 and groups 5-6 respectively, animals were euthanized under anesthesia by cervical dislocation and the selected organs were collected.
[0754] Spleen (free of fat) was cut into small pieces (about 1-2 mm³ per piece) and deposited together in 1 mL of Complete Culture Medium (CCM composed of RPMI1640 medium supplemented with 10% Fetal Bovine Serum (FBS), 1% L-Glutamine and 1% Penicillin-Streptomycin).
[0755] Right inguinal and iliac lymph nodes (side of the IM injection site) were also cut into small pieces (about 1-2 mm³ per piece) and deposited together in 0.5 mL of CCM.

[0756] The spleen pieces with 1 mL of CCM were transferred in a BD™ Medimachine Medicon of 50 μm (pre-rinsed with Cell Wash buffer (BD Biosciences)). The Medicon was inserted in the BD™ Medimachine System, and one cycle of 30 seconds was performed to disaggregate the spleen tissues. The cell suspension obtained was aspirated with a syringe through the syringe port of Medicon. The Medicon was rinsed 2 times with 1 mL of Cell Wash buffer and the cell suspension obtained was also aspirated. Then, the obtained cell suspension was filtered using a BD™ Medimachine Filcon of 100 μm and deposited in a 5 mL tube. The cells were counted using an automatic cell counter. Finally, the cell suspension was split in 2 tubes: 2×10⁶ cells for T cell activation protocol and 1×10⁶ cells for flow cytometry staining. The tubes were centrifuged at 300 g for 7 minutes at RT. The supernatant was completely removed. Cell pellet of tube 1 (for T cell activation protocol) was resuspended in 100 μL of RPMI complete medium (RPMI, 1% P/S, 10% FBS, 1% Hepes 1M, 1% Sodium pyruvate 100 mM, 1% NEAA 100×) and cell pellet of tube 2 (for flow cytometry staining) was resuspended in 100 μL of Cell Wash. Cell suspensions were stored at +5° C.±3° C. until staining for flow cytometry or T cell activation protocol.

[0757] The LNs pieces with 0.5 mL of CCM were transferred in a BD™ Medimachine Medicon of 50 μm (pre-rinsed with Cell Wash buffer). The Medicon was inserted in the BD™ Medimachine System, and one cycle of 30 seconds was performed to disaggregate the LNs tissues. The Medicon was rinsed once with 0.5 mL of Cell Wash buffer and the cell suspension obtained was aspirated with a syringe through the syringe port of Medicon. Then, the obtained cell suspension was filtered using a BD™ Medimachine Filcon of 100 μm and deposited in a 5 mL tube. The cells were counted using an automatic cell counter. Finally, the cell suspension was split in 2 tubes: 2×10⁶ cells for T cell activation protocol and 1×10⁶ cells for flow cytometry staining. The tubes were centrifuged at 300 g for 7 minutes at RT. The supernatant was completely removed. Cell pellet of tube 1 (for T cell activation protocol) was resuspended in 100 μL of RPMI complete medium (RPMI, 1% P/S, 10% FBS, 1% Hepes 1M, 1% Sodium pyruvate 100 mM, 1% NEAA 100×) and cell pellet of tube 2 (for flow cytometry staining) was resuspended in 100 μL of Cell Wash. Cell suspensions were stored at +5° C.±3° C. until staining for flow cytometry or T cell activation protocol.

### F. Quantification of Antibody Anti-OVA by ELISA

[0758] Immunoglobulins (Ig) quantification was performed by an indirect ELISA according to the dedicated kit from Chondrex: Kit #3011 for Total IgG, Kit #3013 for IgG1, Kit #3018 for IgA. The same protocol was used for the three different kits. Briefly, 100 μL of diluted OVA solution were added in each well and then the plate was incubated at +5±3° C. overnight. The plate was washed with 1× wash buffer at least three times and 100 μL of blocking Buffer were added to each well and incubated at RT for 1 hour. The plate was washed a second time and 100 μL of diluted standard [range from to 12.5 ng/mL to 0.2 ng/mL] and serum sample (1/50 dilution) were added in duplicate. The plate was incubated at RT for 2 hours and washed as described before. Then, the secondary antibody was added in each well (100 μL) and the incubation was performed at RT for 1 hour. After incubation, the plate was washed and 100 μL of TMB solution (previously diluted) were added to each well. Reaction with this chromogen solution was done during 25 min at RT and stopped by the addition of 25 μL of 2N sulfuric acid. Finally, the plate was gently mixed, and absorbance was read at 450 nm with a GloMax® plate reader (Promega, Madison, WI). The average of duplicate readings for each standard control were used to plot a standard curve, which was used to quantify the samples in ng/mL of blood.

G. Stimulation Protocol: Interferon Gamma (IFN-g) and Tumor Growth Factor Alpha (TNF-α) Production in CD4+ and CD8+ Populations from Peripheral Blood, LNs and Spleen.

[0759] After resuspension of cell pellet of spleen, LNs and blood in 100 μL of RPMI complete medium, the cell suspension was placed in a 96-well plate and incubated between +35° C. and +40° C. with 1 to 6% of CO₂ until peptide stimulation performed as described below. Briefly, 100 μL of 2× peptide cocktail (2 μg/mL of brefeldin A, 2 μl/mL of SIINFEKL (SEQ ID NO:189) peptide and 5 μl/mL of SQAVHAAHAEINEAGR peptide (SEQ ID NO:190) in RPMI complete medium: RPMI, 1% P/S, 10% FBS, 1% Hepes 1M, 1% Sodium pyruvate 100 mM, 1% NEAA 100×) were added to each experimental well. The 96-well plate was incubated between +35° C. and +40° C. with 1 to 6% of CO₂ overnight (for 17 hours). After incubation, cells were centrifuged at 300 g for 5 minutes at RT and supernatant was discarded. Then cell pellets were resuspended in 200 μL of Stain Buffer and transferred in 5 mL tubes until staining for flow cytometry analysis as described below.

H. Flow Cytometry on Cells Activated with Peptides

### Staining of Cells Suspension:

[0760] After stimulation protocol, cells were centrifuged at 300 g for 5 minutes at RT and supernatant was removed. Cell pellets were resuspended in 54 μL of Mix Fc Block and incubated for 10 minutes at +5±3° C., followed by adding 52.5 μL of the Mix Extra of antibodies (panel detailed in Table 24) and incubation for 30 minutes at RT in dark. 300 μL of Staining buffer were added, tubes were centrifuged at 300 g for 5 minutes at RT; supernatant was discarded, and cells resuspended in 400 μL of staining buffer. Tubes were centrifuged again at 300 g for 5 minutes at RT; supernatant was discarded, cells were resuspended in 200 μL of Cytofix/Cytoperm™ solution (BD) and incubated 20 minutes at +5±3° C. 200 μL of 1× Perm/Wash™ buffer (BD) diluted in water (1/50) were added, tubes were centrifuged again at 300 g for 5 minutes at RT, supernatant was discarded, and cells resuspended in 400 μL of Perm/Wash™ buffer. Tubes were centrifuged again at 300 g for 5 minutes at RT and supernatant was discarded, cells were resuspended in 56 μL of the Mix Intra of antibodies and incubated 30 minutes at +5±3° C. in dark. 300 μL of Perm/Wash™ buffer were added, tubes were centrifuged at 300 g for 5 minutes at RT and supernatant was discarded and cells resuspended in 400 μL of Perm/Wash™ buffer. Finally, tubes were centrifuged again at 300 g for 5 minutes at RT and supernatant was discarded, cells were then resuspended in 300 μL of Stain Buffer for flow cytometry acquisition.

### Preparation of Mix:

[0761] Mix Fc Block: 50 μL of Stain Buffer
[0762] 3 μL of mouse Fc Block
[0763] 1 μL of Golgi Stop

[0764] Mix Extra: Extracellular staining: 50 μL of Brilliant Buffer with:
[0765] 2.0 μL mCD8a/PE,
[0766] 0.3 μL mCD4/PE-Cy7,
[0767] 0.25 μL Live Dead

[0768] Mix Intra: Intracellular staining: 50 μL of Brilliant Buffer with:
[0769] 2.5 μL mTNFa/BV421,
[0770] 3.5 μL mIFNg/BV650.

[0771] Samples were stored at +5±3° C. prior to acquisition.

TABLE 7
Panel of antibodies used in flow cytometry experiments (cells activated with peptides)

| | | | | | | Volume/ | |
|---|---|---|---|---|---|---|---|
| Lasers | Filters | Dye | Description | Clone | Source | sample (μl) | |
| Violet | 448/45 | BV421 | mTNFa | MP6-XT22 | BD 563387 | 2.5 | μl |
| (405 nm) | 606/36 | BV650 | mIFNg | XMG1.2 | BD 563854 | 3.5 | μl |
| Blue | 560 LP | PE | mCD8a | 5H10-1 | BD 567630 | 2.0 | μl |
| (488 nm) | (586/42) | | | | | | |
| | 752 LP | PE-CY7 | mCD4 | RM4-5 | BD 552775 | 0.3 | μl |
| | (783/56) | | | | | | |
| Red | 752 LP | Live/dead | LIVE/DEAD ™ | N/A | Invitrogen | 0.25 | μl |
| (640 nm) | (783/56) | | Fixable Near-IR | | | | |
| | | | Dead Cell | | | | |
| | | | Stain Kit | | | | |

### I. WB, Spleen and LN Cells Staining and Flow Cytometry Acquisitions

[0772] The flow cytometry acquisitions were performed with a BD FACSLyric™ flow cytometer (BD Biosciences). A quality control was performed before each acquisition session using CS&T Beads (BD Biosciences).

### Staining of Cells Suspension:

[0773] A red blood cell (RBC) lysis was performed before staining for the blood samples using the BD FACS™ Lyse Wash Assistant (LWA) (Duo-lyse-VXC protocol). Briefly, 100 μL of WB were incubated sequentially with 900 μL and then with 700 μL of BD Pharm Lyse™ lysing buffer solution, to lyse the RBCs. Samples were washed with BD® CellWASH buffer (BD Biosciences) to obtain a cell suspension of about 350 μL. Then, staining of WB, spleen, small intestine and LNs suspension cells was performed according to the following protocol:

[0774] Cells (about 1×10⁶ cells in 100 μL of CellWASH buffer or WB cell suspension obtained after RBC lysis) were incubated for 5 minutes with 54 μL of Mix Fc Block in the dark at +5±3° C. Next, cells were incubated for 30 minutes in the dark at +5±3° C. with 68 μL of mix of antibodies Mix Extra (panel detailed in Table 25). Cells were washed with BD© CellWASH buffer (BD Biosciences) and were resuspended with about 350 L±50 μL of CellWASH buffer using the LWA (Wash only-VXC protocol).

### Staining Preparation of Mix:

[0775] Mix Fc Block: 50 μL of Stain Buffer
[0776] 3 μL of mouse Fc Block
[0777] 1 μL of Golgi Stop

[0778] Mix Extra: Extracellular staining: 50 μL of Brilliant Buffer buffer with all antibodies as described in Table 25.

[0779] Samples were stored at +5±3° C. prior to acquisition.

TABLE 8
Panel of antibodies used in flow cytometry experiments (WB, Spleen and LN cells)

| | | | | | Volume/ | |
|---|---|---|---|---|---|---|
| Lasers | Filters | Dye | Description | Clone | sample μl | |
| Violet | 715/50 | BV711 | mcD62L | MEL-14 | 1.25 | ul |
| (405 nm) | 755 LP | BV786 | mcD49d | Clone R1-2 | 3.5 | μl |
| Blue | 560LP (586/42) | PE | mcD8a | 5H10-1 | 2.0 | μl |
| (488 nm) | 665 LP (700/54) | BY700 | mcD44 | IM7 | 3.5 | μl |
| | 752 LP (783/56) | PE-CY7 | mcD4 | RM4-5 | 0.3 | μl |
| Red | 660/10 | AF 647 | mcD11a | M17/4 | 3.5 | μl |
| (640 nm) | 705 LP (720/30) | R718 | mcD127 | A7R34 | 3.5 | μl |
| | 752 LP (783/56) | Live/Dead ™ | Live/Dead ™ | N/A | 0.25 | μl |
| | | stain | stain Kit* | | | |

*Live/Dead ™Fixable Near-IR Dead Cell Stain Kit

### J. Flow Cytometry Analysis

[0780] Samples were acquired on the day of staining on BD FACS Lyric™ flow cytometer. About 100,000 events were recorded or the totality of the tube. Flow cytometry data were analyzed with BD FACSuite™ software. The following parameters (number of events and percentages) were analyzed in whole blood, spleen, and lymph nodes suspension cells non-activated with peptides:
[0781] Viable cells
[0782] Among viable cells:
[0783] CD4+/CD8− cells
[0784] CD8+/CD4− cells
[0785] CD4+/CD8+ cells
[0786] CD4−/CD8− cells
[0787] Among CD4+/CD8− viable cells and among CD8+/CD4− viable cells
[0788] CD49+ cells
[0789] CD49− cells
[0790] CD11a+ cells
[0791] CD11a− cells
[0792] CD44+ cells
[0793] CD62L+ cells
[0794] CD44 low/CD62L high cells
[0795] CD44 low/CD62L low cells
[0796] CD44 high/CD62L low cells
[0797] CD44 high/CD62L high cells
[0798] CD127+ cells
[0799] Among CD4+/CD8+ viable cells and among CD4−/CD8− viable cells
[0800] CD44+/CD62L+/CD49d+ cells
[0801] CD44+/CD62L+/CD49d− cells
[0802] CD49+/CD11a+ cells
[0803] CD49+/CD11a− cells

[0804] The following parameters (number of events and percentages) were analyzed in whole blood, spleen, intestine, and lymph nodes suspension cells activated with peptides:
[0805] Viable cells
[0806] Among viable cells:
[0807] CD4+/CD8− viable cells
[0808] CD8+/CD4− viable cells
[0809] Among CD4+/CD8− viable cells
[0810] IFNγ+ cells
[0811] IFNγ Mean Fluorescence Intensity (MFI)
[0812] TNFα+ cells
[0813] TNFα MFI

[0814] Overall, only the data obtained on a parent population with more than 100 events were analyzed

### K. Results:

[0815] The administration of MEVs loaded with OVA elicited a humoral immune response against OVA, when administered by the IM route twice at day 0 and day 21. MEVs loaded with OVA not only induce IgG antibodies against OVA, but also induce a strong isotype switching from IgG to IgA antibodies, indicating the mediation of a cellular immune responsive to the isotype switching (see, FIG. 14B). Control groups were mice immunized with OVA/adjuvant or only with adjuvant as shown in FIG. 14A.

[0816] FIGS. 18, 19A-B, and 20A-B show the results of the immunization with MEVs loaded with OVA by IM administration, in terms of the CD44/CD62L cell populations. FIG. 18 shows the gating used in the experiment. FIG. 19 shows the results in spleen; FIG. 19A shows the population of CD4+/CD44/CD62L cells, and FIG. 19B the population of CD8+/CD44/CD62L cells. The results show an increase of the CD44+/CD62L+ population for CD4+ and for CD8+ cells. These results indicate an increase in the T central memory cells after the immunization with MEVs loaded with OVA by IM administration. FIGS. 20A and 20B show the outcome for the same populations that occur in the inguinal lymph nodes.

[0817] FIGS. 21A-B, 22A-B, and 23A-B show the outcome after immunization with MEVs loaded with OVA by IM administration in the cellular immune response in terms of the CD44(hi)/CD49d cell populations. FIGS. 21A-B show the gating used in the experiment. FIGS. 22A-B show the outcome in spleen; FIG. 22A shows the CD4+/CD44+/CD62L+/CD49− cell populations, and FIG. 22B shows the CD8+/CD44+/CD62L+/CD49− cell populations. The results demonstrate an increase of the CD44+/CD62L+/CD49− cells for both CD4+ and CD8+. These results indicate an increase in the T virtual central memory activated cells after the immunization with MEVs loaded with OVA by IM administration. FIGS. 23A and 23B show the results for the same populations found in the inguinal lymph nodes.

[0818] FIGS. 24A-B, 25A-B, and 26A-B show the outcome after immunization with MEVs loaded with OVA by IM administration in cellular immune response, in terms of CD44(hi)/CD11a(hi) cell populations. FIGS. 24A-B show the gating used in the experiment. FIG. 25A-B show the results in spleen; FIG. 25A shows the CD4+/CD44(hi)/CD11a(hi) cell population, and FIG. 25B shows the CD8+/CD44(hi)/CD11a(hi) cell population.

[0819] The results demonstrate an increase of the CD44(hi)/CD11a(hi) cell populations for CD4+ and for CD8+. These results indicate an increase in the antigen specific T cells after the immunization with MEVs loaded with OVA by IM administration. FIGS. 26A and 26B show the results for the same populations found in the inguinal lymph nodes.

### L. Conclusions

[0820] The immunization by MEVs loaded with an immunogenic payload after IM administration elicits a payload-specific humoral and cellular immune responses. The observation of the isotype class switching (from IgG to IgA antibodies) by antigen-loaded MEVs is in accord with the observation that antigen-loaded MEVs elicit an antigen-specific cellular response.

### Example 9

Assessment of the Capacity of Extracellular Vesicles from Microalgae (MEVs) as a
Protein Vaccine Delivery System after Oral (PO) Administration.

### A. In Vivo Study in Healthy C57BL/6J Mice.

[0821] Animals were divided in groups (6 mice per group) and treated with the following:
[0822] Group 1: PO administered with MEV-OVA on Days 0, 7, 14, and 21,
[0823] Group 2: PO administered with MEV only on Days 0, 7, 14, and 21,
[0824] Group 3: PO administered with MEV only on Days 0, 7, 14, and 21, and with MEV-OVA on Days 40, 47, 54, and 61.

[0825] Mice in groups 1-2 were euthanized on Day 43 after the first vaccinal administration. Mice in group 3 were euthanized on Day 82 after the first vaccinal administration.

[0826] Whole blood was sampled just before euthanasia to collect serum for quantification of anti-OVA antibody by Enzyme-Linked Immunosorbent Assay (ELISA), and to perform flow cytometry as defined below.

[0827] Just after euthanasia, spleen is collected and processed to perform flow cytometry analysis to quantify the T cell activation after in vitro stimulation with OVA peptides.

### B. Immunization Material and Mice Treatment:

1. Group 1: MEVs Loaded with OVA

[0828] On Days 0, 7, 14 and 21:

[0829] MEVs were produced, purified, and characterized as described in Examples 1 and 2. MEVs were loaded with ovalbumin as described in Example 2. MEV-OVA were vigorously mixed by vortexing for about 60 seconds and used to treat the mice of Group 1.

### 2. Group 2: MEV (Non-Loaded)

[0830] On Days 0, 7, 14, and 21:

[0831] MEVs were produced, purified, and characterized as described in Examples 1 and 2. Non-loaded MEVs were vigorously mixed by vortexing for about 60 seconds and used to treat the mice of Group 2.

3. Group 3: MEVs-Non Loaded+MEVs Loaded with OVA

[0832] On Days 0, 7, 14, and 21:

[0833] MEVs were produced, purified, and characterized as described in Examples 1 and 2. Non-loaded MEVs were vigorously mixed by vortexing for about 60 seconds and used to treat the mice of Group 3.

[0834] On Days 40, 47, 54, and 61:

[0835] MEVs were produced, purified, and characterized as described in Examples 1 and 2. MEVs were loaded with ovalbumin as described in Example 2. MEV-OVA were vigorously mixed by vortexing for about 60 seconds and used to treat the mice of Group 3.

### C. Oral Administration

[0836] PO (per os) administration was performed using a disposable plastic syringe and an appropriate needle.

[0837] On Day 0, 7, 14, and Day 21:
[0838] Group 1 was PO administered with 100 μL of MEV-OVA at a concentration of 4¹⁰ particles/mL,
[0839] Group 2 was PO administered with 100 μL of non-loaded MEVs at a concentration of 1·2¹¹ particles/mL,
[0840] Group 3 was PO administered with 100 μL of non-loaded MEVs at a concentration of 1·2¹¹ particles/mL,
[0841] Group 3 was PO administered with 100 μL of non-loaded MEVs at a concentration of 1·2¹¹ particles/mL,

[0842] On Day 40, 47, 54, and 61
[0843] Group 3 was PO administered with 100 μL of MEV-OVA at a concentration of 4¹¹ particles/mL.

### D. Blood Sampling and Serum Collection

[0844] According to the experimental schedule, at 43 or 82 days after first PO administration in groups 1-2 or group 3 respectively, whole blood (WB) was collected by retro-orbital sinus or intracardiac puncture under anesthesia. Whole Blood sampling for flow cytometry acquisitions and for serum collection was performed as described in Example 6.

### E. Animal Euthanasia and Organs Sampling and Processing

[0845] According to the experimental schedule, at 43 or 82 days after first PO administration groups 1-2 and group 3 respectively, animals were euthanized under anesthesia and the spleen was collected and processed as described in Example 6.

### F. Quantification of Antibody Anti-OVA by ELISA

[0846] Immunoglobulin (Ig) quantification was performed by an indirect ELISA as described in Example 6.

G. Interferon Gamma (IFN-g) and Tumor Growth Factor Alpha (TNF-α) Production in CD4+ and CD8+ Populations from Peripheral Blood and Spleen.

[0847] The stimulation protocol was used as described in Example 6.

H. Flow Cytometry on Cells Activated with Peptides

[0848] The cells were stained as described in Example 6

### I. WB and Spleen Cells Staining and Flow Cytometry Acquisitions

[0849] The flow cytometry acquisitions were performed as described in Example 6.

### J. Flow Cytometry Analysis

[0850] Samples were acquired as described in Example 6.

[0851] The administration (at days 0, 7, 14, and 21) in mice, by the PO route, of MEVs loaded with OVA elicits a humoral immune response against OVA. Moreover, MEVs loaded with OVA not only induce IgG but also IgA antibodies against OVA, showing a strong isotype class switching IgG to IgA antibodies, thus indicating a cellular immune response, as shown in FIG. 14C. The control mice were immunized with OVA/adjuvant or only with adjuvant; results shown in FIG. 14A.

[0852] The immunization with MEVs loaded with OVA by PO administration induce a cellular immune response, involving the CD44/CD62L cell population, and showing an increase in the T virtual central memory activated on TCD4+ and TCD8+ cells.

[0853] The immunization with MEVs loaded with OVA by PO administration induce a cellular immune response, involving the CD44(hi)/CD49d cell populations, and showing an increase in the T central memory on TCD4+ and TCD8+ cells.

[0854] The immunization with MEVs loaded with OVA by PO administration induces a cellular immune response, involving the CD44(hi)/CD11a(hi) cell populations, and showing an increase on the T central memory on TCD4+ and TCD8+ cells.

### K. Conclusions

[0855] The administration of MEVs loaded with an immunogenic payload by the PO route elicits a humoral immune response, and a cellular immune response. The observation of the isotype class switching (from IgG to IgA antibodies) by antigen-loaded MEVs is in full agreement with the observation that antigen-loaded MEVs elicit an antigen-specific cellular response. The observations above support the notion that by PO administration, MEVs elicit a mucosal immune response against their payload.

[0856] The use of MEVs by PO administration as a vaccine delivery system (VDS) overcomes the general observation that oral/intestinal delivery of antigens is rather tolerogenic (creates tolerance, rather than immune response, against the antigen). Results presented here show the MEVs are a vaccination delivery system that is non-tolerogenic, as they elicit strong humoral and cellular immune responses against the antigenic payload.

[0857] The repeat treatment with non-loaded MEVs by PO administration does not preclude the appearance of the immune response against OVA when the same animals are subsequently administered with OVA-loaded MEVs (FIG. 14C). This observation demonstrates the absence of a neutralizing reaction against MEVs, and the absence of a tolerogenic response to MEVs (see above).

[0858] As shown in the FIG. 14C, orally administered MEVs elicit humoral immune response against an antigenic payload. It is surprising that the oral delivery of protein antigen loaded into MEVs results in generation of antigen-specific antibodies. Oral delivery is the most desirable and patient-accepted route of administration, with over 60% of commercialized small molecule drug products using the oral route. What is more, oral route of vaccine administration provides the advantage of stimulating mucosal immunity (as discussed in Examples 6). The vaccine-generated antibodies specific to MEV cargo include both IgG and IgA immunoglobulins. Hence, the immune response following per os MEV administration is characterized by significant isotype class switching to IgA antibodies, which indicates MEV potential for triggering mucosal immunity. MEV-based formulations for oral delivery may therefore offer added value for vaccine development.

### Example 10

Assessment of the Capacity of Extracellular Vesicles from Microalgae (MEVs) as a Peptide Vaccine Delivery System after Intramuscular (IM) Administration.

### A. In Vivo Study in Healthy C57BL/6J Mice.

[0859] Animals are divided in groups (6 mice per group) and treated with the following:
[0860] Group 1: IM administered with MEV-OVApep-CD8 on Days 0 and 21,
[0861] Group 2: IM administered with MEV-OVApep-CD4 on Days 0 and 21,
[0862] Group 3: IM administered with MEV-OVApep-CD4 and MEV-OVApep-CD8 on Days 0 and 21,
[0863] Group 4: IM administered with MEV only on Days 0 and 21,

[0864] Mice are euthanized on Day 43.

[0865] Whole blood is sampled just before euthanasia to collect serum for quantification of anti-OVA antibody by Enzyme-Linked Immunosorbent Assay (ELISA), and to perform flow cytometry as defined below.

[0866] Just after euthanasia, spleen, and inguinal and iliac lymph nodes (LNs) are collected and processed to perform flow cytometry analysis to quantify the T cell activation after in vitro stimulation with OVA peptides.

### B. Immunization Material and Mice Treatment:

[0867] 1. Group 1: MEVs loaded with OVA peptide CD8

[0868] On Days 0, and 21:

[0869] MEVs are produced, purified, and characterized as described in Examples 1 and 2. MEVs are loaded with dominant epitope of ovalbumin OVA₂₅₇₋₂₆₄ (SIINFEKL; SEQ ID NO:189) as described in Example 2. MEV-OVApep-CD8 are vigorously mixed by vortexing for about 60 seconds and used to treat the mice of Group 1.
[0870] 2. Group 2: MEVs loaded with OVA peptide CD4

[0871] On Days 0, and 21:

[0872] MEVs are produced, purified, and characterized as described in Examples 1 and
[0873] 2. MEVs are loaded with dominant epitope of ovalbumin OVA₃₂₃₋₃₃₉ (SQAVHAAHAEINEAGR; SEQ ID NO:190) as described in Example 2.

[0874] MEV-OVApep-CD4 are vigorously mixed by vortexing for about 60 seconds and used to treat the mice of Group 2.
[0875] 3. Group 3: MEVs loaded with OVA peptide CD4 and OVA peptide CD8

[0876] On Days 0, and 21:
[0877] MEVs are produced, purified, and characterized as described in Examples 1 and 2. MEVs are loaded with dominant epitope of ovalbumin OVA₃₂₃₋₃₃₉ and ovalbumin OVA₂₅₇₋₂₆₄ as described in Example 2. MEV-OVApep-CD4 are vigorously mixed by vortexing for about 60 seconds and used to treat the mice of Group 3.
[0878] 4. Group 4: MEVs (non-loaded)

[0879] On Days 0, and 21:

[0880] MEVs are produced, purified, and characterized as described in Examples 1 and 2. Non-loaded MEVs are vigorously mixed by vortexing for about 60 seconds and used to treat the mice of Group 4.

### C. Intramuscular Administration

[0881] IM injections are performed into the right quadriceps using a disposable plastic syringe and an appropriate needle.

[0882] On Day 0 and Day 21:
[0883] Group 1, Group 2 and Group 3 is IM administered with 100 μL of MEV-OVApep at a concentration of 4¹ particles/mL,
[0884] Group 4 is IM administered with 40 μL of MEV at a concentration of 1·2¹¹ particles/mL,

### D. Blood Sampling and Serum Collection

[0885] According to the experimental schedule, at 43 days after first IM administration, whole blood (WB) is collected by retro-orbital sinus or intracardiac puncture under anesthesia. Whole Blood sampling for flow cytometry acquisitions and for serum collection is performed as described in Example 6.

### E. Animal Euthanasia and Organs Sampling and Processing

[0886] According to the experimental schedule, at 43 days after first IM administration, animals are euthanized under anesthesia and the selected organs are collected and processed as described in Example 6.

### F. Quantification of Antibody Anti-OVA by ELISA

[0887] Immunoglobulin (Ig) quantification is performed by an indirect ELISA as described in Example 6.

G. Interferon Gamma (IFN-g) and Tumor Growth Factor Alpha (TNF-α) Production in CD4+ and CD8+ Populations from Peripheral Blood, LNs and Spleen.

[0888] The stimulation protocol is used as described in Example 6.

H. Flow Cytometry on Cells Activated with Peptides

[0889] The cells are stained as described in Example 6.

### I. WB, LNs and Spleen Cells Staining and Flow Cytometry Acquisitions

[0890] The flow cytometry acquisitions are performed as described in Example 6.

### J. Flow Cytometry Analysis

[0891] Samples are acquired as described in Example 6.

### Example 11

Assessment of the Capacity of Extracellular Vesicles from Microalgae (MEVs) as a Peptide Delivery System after Oral (PO) Administration.

### A. In Vivo Study in Healthy C57BL/6J Mice.

[0892] Animals are divided into 2 groups (6 mice per group) and treated with the following:
[0893] Group 1: IM administered with MEV-OVApep-CD8 on Days 0, 7, 14, and 21,
[0894] Group 2: IM administered with MEV-OVApep-CD4 on Days 0, 7, 14, and 21,
[0895] Group 3: IM administered with MEV-OVApep-CD4 and MEV-OVApep-CD8 on Days 0, 7, 14, and 21,
[0896] Group 4: IM administered with MEV only on Days 0, 7, 14, and 21,

[0897] Mice are euthanized on Day 43.

[0898] Whole blood is sampled just before euthanasia to collect serum for quantification of anti-OVA antibody by Enzyme-Linked Immunosorbent Assay (ELISA), and to perform flow cytometry as defined below.

[0899] Just after euthanasia, spleen is collected and processed to perform flow cytometry analysis to quantify the T cell activation after in vitro stimulation with OVA peptides.

### B. Immunization Material and Mice Treatment:

[0900] 1. Group 1: MEVs loaded with OVA peptide-CD8
   [0901] On Days 0, 7, 14 and 21:
   [0902] a. MEVs are produced, purified, and characterized as described in Examples 1 and 2.
   [0903] b. MEVs are loaded with dominant epitope of ovalbumin OVA257-264 (SIINFEKL, (SEQ ID NO: 189) as described in Example 2. MEV-OVApep-CD8 are vigorously mixed by vortexing for about 60 seconds and used to treat the mice of Group 1.
[0904] 2. Group 2: MEVs loaded with OVA peptide CD4
   [0905] On Days 0, 7, 14 and 21:
   [0906] a. MEVs are produced, purified, and characterized as described in Examples 1 and 2.
   [0907] b. MEVs are loaded with dominant epitope of ovalbumin OVA₃₂₃₋₃₃₉ (SQAVHAAHAEINEAGR, (SEQ ID NO:190) as described in Example 2. MEV-OVApep are vigorously mixed by vortexing for about 60 seconds and used to treat the mice of Group 2.
[0908] 3. Group 3: MEVs loaded with OVA peptide-CD4 and OVA peptide-CD8
   [0909] On Days 0, 7, 14 and 21:
   [0910] a. MEVs are produced, purified, and characterized as described in Examples 1 and 2.
   [0911] b. MEVs are loaded with dominant epitope of ovalbumin OVA₃₂₃₋₃₃₉ and ovalbumin OVA 257-264 as described in Example 2. MEV-OVApep are vigorously mixed by vortexing for about 60 seconds and used to treat the mice of Group 3.
[0912] 4. Group 4: MEV (non-loaded)
   [0913] On Days 0, 7, 14, and 21:
   [0914] a. MEVs are produced, purified, and characterized as described in Examples 1 and 2.
   [0915] b. Non-loaded MEVs are vigorously mixed by vortexing for about 60 seconds and used to treat the mice of Group 4.

### C. Oral Administration

[0916] PO (per os) administration is performed using a disposable plastic syringe and an appropriate needle.

[0917] On Day 0, 7, 14, and Day 21:
[0918] Group 1, Group 2, and Group3 is PO administered with 100 μL of MEV-OVA-peptides at a concentration of 4¹⁰ particles/mL,
[0919] Group 2 is PO administered with 100 μL of non-loaded MEVs at a concentration of 1·2¹¹ particles/mL.

### D. Blood Sampling and Serum Collection

[0920] According to the experimental schedule, at 43 days after first PO administration whole blood (WB) is collected by retro-orbital sinus or intracardiac puncture under anesthesia. Whole Blood sampling for flow cytometry acquisitions and for serum collection is performed as described in Example 6.

### E. Animal Euthanasia and Organs Sampling and Processing

[0921] According to the experimental schedule, at 43 days after first PO administration animals are euthanized under anesthesia and the spleen is collected and processed as described in Example 6.

### F. Quantification of Antibody Anti-OVA by ELISA

[0922] Immunoglobulin (Ig) quantification is performed by an indirect ELISA as described in Example 6.

G. Interferon Gamma (IFN-g) and Tumor Growth Factor Alpha (TNF-α) Production in CD4+ and CD8+ Populations from Peripheral Blood and Spleen.

[0923] The stimulation protocol is used as described in Example 6.

H. Flow Cytometry on Cells Activated with Peptides

[0924] The cells are stained as described in Example 6.

### I. WB and Spleen Cells Staining and Flow Cytometry Acquisitions

[0925] The flow cytometry acquisitions are performed as described in Example 6.

### J. Flow Cytometry Analysis

[0926] Samples are acquired as described in Example 6.

### Example 12

Assessment of the Capacity of Extracellular Vesicles from Microalgae (MEVs) as a mRNA Vaccine Delivery System after Intramuscular (IM) Administration.

### A. In Vivo Study in Healthy C57BL/6J Mice.

[0927] Animals are divided into 2 groups (6 mice per group) and treated with the following:
[0928] Group 1: IM administered with MEV-OVA mRNA (OVA encoding mRNA) on Days 0 and 21,
[0929] Group 2: IM administered with MEVs only on Days 0 and 21,
[0930] Mice are euthanized on Day 43.

[0931] Whole blood is sampled just before euthanasia to collect serum for quantification of anti-OVA antibody by Enzyme-Linked Immunosorbent Assay (ELISA), and to perform flow cytometry as defined below.

[0932] Just after euthanasia, spleen, and inguinal and iliac lymph nodes (LNs) are collected and processed to perform flow cytometry analysis to quantify the T cell activation after in vitro stimulation with OVA peptides.

### B. Immunization Material and Mice Treatment:

1. Group 1: MEVs Loaded with OVA mRNA

[0933] On Days 0, and 21:

[0934] MEVs are produced, purified, and characterized as described in Examples 1 and 2. MEVs are loaded with ovalbumin mRNA (OVA mRNA) as described in Example 2. MEV-OVA mRNA are vigorously mixed by vortexing for about 60 seconds and used to treat the mice of Group 1.

### 2. Group 2: MEVs (Non-Loaded)

[0935] On Days 0, and 21:

[0936] MEVs are produced, purified, and characterized as described in Examples 1 and 2. Non-loaded MEVs are vigorously mixed by vortexing for about 60 seconds and used to treat the mice of Group 2.

### C. Intramuscular Administration

[0937] IM injections are performed into the right quadriceps using a disposable plastic syringe and an appropriate needle.

[0938] On Day 0 and Day 21:
[0939] Group 1 is IM administered with 100 μL of MEV-OVA mRNA at a concentration of 4¹⁰ particles/mL,
[0940] Group 2 is IM administered with 40 μL of MEVs at a concentration of 1·2¹¹ particles/mL,

### D. Blood Sampling and Serum Collection

[0941] According to the experimental schedule, at 43 days after first IM administration, whole blood (WB) is collected by retro-orbital sinus or intracardiac puncture under anesthesia. Whole Blood sampling for flow cytometry acquisitions and for serum collection is performed as described in Example 6.

### E. Animal Euthanasia and Organs Sampling and Processing

[0942] According to the experimental schedule, at 43 days after first IM administration, animals are euthanized under anesthesia and the selected organs are collected and processed as described in Example 6.

### F. Quantification of Antibody Anti-OVA by ELISA

[0943] Immunoglobulin (Ig) quantification is performed by an indirect ELISA as described in Example 6.

G. Interferon Gamma (IFN-g) and Tumor Growth Factor Alpha (TNF-α) Production in CD4+ and CD8+ Populations from Peripheral Blood, LNs and Spleen.

[0944] The stimulation protocol is used as described in Example 6.

H. Flow Cytometry on Cells Activated with Peptides

[0945] The cells are stained as described in Example 6.

### I. WB, LNs and Spleen Cells Staining and Flow Cytometry Acquisitions

[0946] The flow cytometry acquisitions are performed as described in Example 6.

### J. Flow Cytometry Analysis

[0947] Samples are acquired as described in Example 6.

### Example 13

Assessment of the Capacity of Extracellular Vesicles from Microalgae (MEVs) as a mRNA Delivery System after Oral (PO) Administration.

### A. In Vivo Study in Healthy C57BL/6J Mice.

[0948] Animals are divided into groups (6 mice per group) and treated with the following:
[0949] Group 1: PO administered with MEV-OVA mRNA on Days 0, 7, 14, and 21,
[0950] Group 2: PO administered with MEV only on Days 0, 7, 14 and 21.

[0951] Mice are euthanized on Day 43.

[0952] Whole blood is sampled just before euthanasia to collect serum for quantification of anti-OVA antibody by Enzyme-Linked Immunosorbent Assay (ELISA), and to perform flow cytometry as defined below.

[0953] Immediately after euthanasia, spleen is collected and processed to perform flow cytometry analysis to quantify the T cell activation after in vitro stimulation with OVA peptides.

### B. Immunization Material and Mice Treatment:

1. Group 1: MEVs Loaded with OVA mRNA

[0954] On Days 0, 7, 14 and 21:

[0955] MEVs are produced, purified, and characterized as described in Examples 1 and 2. MEVs are loaded with mRNA for ovalbumin (OVA mRNA) as described in the Examples above.

[0956] MEV-OVA mRNA is vigorously mixed by vortexing for about 60 seconds and used to treat the mice of Group 1.

### 2. Group 2: MEV (Non-Loaded)

[0957] On Days 0, 7, 14, and 21:

[0958] MEVs are produced, purified, and characterized as described in Examples 1 and 2. Non-loaded MEVs are vigorously mixed by vortexing for about 60 seconds and used to treat the mice of Group 2.

### C. Oral Administration

[0959] PO (per os) administration is performed using a disposable plastic syringe and an appropriate needle.

[0960] On Day 0, 7, 14, and Day 21:
[0961] Group 1 is PO administered with 100 μL of MEV-OVA mRNA at a concentration of 4¹⁰ particles/mL,
[0962] Group 2 is PO administered with 100 μL of non-loaded MEVs at a concentration of 1·2¹¹ particles/mL.

### D. Blood Sampling and Serum Collection

[0963] According to the experimental schedule, at 43 days after first PO administration whole blood (WB) is collected by retro-orbital sinus or intracardiac puncture under anesthesia. Whole Blood sampling for flow cytometry acquisitions and for serum collection is performed as described in Example 6.

### E. Animal Euthanasia and Organs Sampling and Processing

[0964] According to the experimental schedule, at 43 days after first PO administration animals are euthanized under anesthesia and the spleen is collected and processed as described in Example 6.

### F. Quantification of Antibody Anti-OVA by ELISA

[0965] Immunoglobulin (Ig) quantification is performed by an indirect ELISA as described in Example 6.

G. Interferon Gamma (IFN-g) and Tumor Growth Factor Alpha (TNF-α) Production in CD4+ and CD8+ Populations from Peripheral Blood and Spleen.

[0966] The stimulation protocol is used as described in Example 6.

H. Flow Cytometry on Cells Activated with Peptides

[0967] The cells are stained as described in Example 6.

### I. WB and Spleen Cells Staining and Flow Cytometry Acquisitions

[0968] The flow cytometry acquisitions are performed as described in Example 6.

### J. Flow Cytometry Analysis

[0969] Samples are acquired as described in Example 6.

### Example 14

Assessment of the Capacity of Extracellular Vesicles from Microalgae (MEVs) as a DNA Vaccine Delivery System after Intramuscular (IM) Administration

### A. In Vivo Study in Healthy C57BL/6J Mice.

[0970] Animals are divided into 2 groups (6 mice per group) and treated with the following:
[0971] Group 1: IM administered with MEV-pOVA on Days 0 and 21,
[0972] Group 2: IM administered with MEV only on Days 0 and 21,

[0973] Mice are euthanized on Day 43.

[0974] Whole blood is sampled just before euthanasia to collect serum for quantification of anti-OVA antibody by Enzyme-Linked Immunosorbent Assay (ELISA), and to perform flow cytometry as described below. Immediately after euthanasia, spleen, and inguinal and iliac lymph nodes (LNs) are collected and processed to perform flow cytometry analysis to quantify the T cell activation after in vitro stimulation with OVA peptides.

### B. Immunization Material and Mice Treatment:

1. Group 1: MEVs Loaded with pOVA

[0975] On Days 0, and 21:

[0976] MEVs are produced, purified, and characterized as described in Examples 1 and 2. MEVs are loaded with OVA-encoding expression plasmid DNA (pOVA, cat. no. 31598, Addgene) as described in Example 2. MEV-pOVA are vigorously mixed by vortexing for about 60 seconds and used to treat the mice of Group 1.

### 2. Group 2: MEVs (Non-Loaded)

[0977] On Days 0, and 21:

[0978] MEVs are produced, purified, and characterized as described in Examples 1 and 2. Non-loaded MEVs are vigorously mixed by vortexing for about 60 seconds and used to treat the mice of Group 2.

### C. Intramuscular Administration

[0979] IM injections are performed into the right quadriceps using a disposable plastic syringe and an appropriate needle.

[0980] On Day 0 and Day 21:
[0981] Group 1 is IM administered with 100 μL of MEV-pOVA at a concentration of 4¹⁰ particles/mL,
[0982] Group 2 is IM administered with 40 μL of MEVs at a concentration of 1·2¹¹ particles/mL,

### D. Blood Sampling and Serum Collection

[0983] According to the experimental schedule, at 43 days after first IM administration, whole blood (WB) is collected by retro-orbital sinus or intracardiac puncture under anesthesia. Whole Blood sampling for flow cytometry acquisitions and for serum collection is performed as described in Example 6.

### E. Animal Euthanasia and Organs Sampling and Processing

[0984] According to the experimental schedule, at 43 days after first IM administration, animals are euthanized under anesthesia and the selected organs are collected and processed as described in Example 6.

### F. Quantification of Antibody Anti-OVA by ELISA

[0985] Immunoglobulin (Ig) quantification is performed by an indirect ELISA as described in Example 6.

G. Interferon Gamma (IFN-g) and Tumor Growth Factor Alpha (TNF-α) Production in CD4+ and CD8+ Populations from Peripheral Blood, LNs and Spleen.

[0986] The stimulation protocol is used as described in Example 6.

H. Flow Cytometry on Cells Activated with Peptides

[0987] The cells are stained as described in Example 6.

### I. WB, LNs and Spleen Cells Staining and Flow Cytometry Acquisitions

[0988] The flow cytometry acquisitions are performed as described in Example 6.

### J. Flow Cytometry Analysis

[0989] Samples are acquired as described in Example 6.

### Example 15

Assessment of the Capacity of Extracellular Vesicles from Microalgae (MEVs) as a DNA Delivery System after Oral (PO) Administration.

### A. In Vivo Study in Healthy C57BL/6J Mice.

[0990] Animals are divided into 2 groups (6 mice per group) and treated with the following:
[0991] Group 1: PO administered with MEV-pOVA on Days 0, 7, 14, and 21,
[0992] Group 2: PO administered with MEVs only on Days 0, 7, 14, and 21.

[0993] Mice are euthanized on Day 43.

[0994] Whole blood is sampled just before euthanasia to collect serum for quantification of anti-OVA antibody by Enzyme-Linked Immunosorbent Assay (ELISA), and to perform flow cytometry as defined below.

[0995] Just after euthanasia, spleen is collected and processed to perform flow cytometry analysis to quantify the T cell activation after in vitro stimulation with OVA peptides.

### B. Immunization Material and Mice Treatment:

1. Group 1: MEVs Loaded with pOVA

[0996] On Days 0, 7, 14, and 21:

[0997] MEVs are produced, purified, and characterized as described in Examples 1 and 2. MEVs are loaded with OVA-encoding expression plasmid DNA (pOVA, cat. no. 31598, Addgene) as described in Example 2. MEV-pOVA are vigorously mixed by vortexing for about 60 seconds and used to treat the mice of Group 1.

### 2. Group 2: MEV (Non-Loaded)

[0998] On Days 0, 7, 14, and 21:

[0999] MEVs are produced, purified, and characterized as described in Examples 1 and 2. Non-loaded MEVs are vigorously mixed by vortexing for about 60 seconds and used to treat the mice of Group 2.

### C. Oral Administration

[1000] PO (per os) administration is performed using a disposable plastic syringe and an appropriate needle.

[1001] On Day 0, 7, 14, and Day 21:
[1002] Group 1 is PO administered with 100 μL of MEV-pOVA at a concentration of 4¹ particles/mL,
[1003] Group 2 is PO administered with 100 μL of non-loaded MEVs at a concentration of 1·2¹¹ particles/mL.

### D. Blood Sampling and Serum Collection

[1004] According to the experimental schedule, at 43 days after first PO administration whole blood (WB) is collected by retro-orbital sinus or intracardiac puncture under anesthesia. Whole Blood sampling for flow cytometry acquisitions and for serum collection is performed as described in Example 6.

### E. Animal Euthanasia and Organs Sampling and Processing

[1005] According to the experimental schedule, at 43 days after first PO administration animals are euthanized under anesthesia and the spleen is collected and processed as described in Example 6.

### F. Quantification of Antibody Anti-OVA by ELISA

[1006] Immunoglobulin (Ig) quantification is performed by an indirect ELISA as described in Example 6.

G. Interferon Gamma (IFN-g) and Tumor Growth Factor Alpha (TNF-α) Production in CD4+ and CD8+ Populations from Peripheral Blood and Spleen.

[1007] The stimulation protocol is used as described in Example 6.

H. Flow Cytometry on Cells Activated with Peptides

[1008] The cells are stained as described in Example 6.

I. WB and Spleen cells staining and flow cytometry acquisitions

[1009] The flow cytometry acquisitions are performed as described in Example 6.

J. Flow cytometry analysis

[1010] Samples are acquired as described in Example 6.

### Example 16

Assessment of Anti-Tumor Efficacy of MEV-Based Vaccine Delivery Systems after Intramuscular (IM) and Oral (PO) Administration.

### A. Animal Model

[1011] C57BL/6J mice are used for the in vivo tumor growth studies. Briefly, B16-OVA cells and E.G7-OVA cells are harvested at the exponential growth phase and washed with PBS. The animals are divided into groups and injected subcutaneously into the right flank with B16-OVA cells (2×10⁵ in 100 μL) or E.G7-OVA cells (2×10⁶ in 100 μL). Tumor size is measured daily using electronic calipers and is expressed as a volume (mm³) using the volume equation 0.5×(a×b²), in which a is the long diameter and b is the short diameter.

### B. Prophylactic Vaccination Scheme

[1012] The animals (12 mice per group) are treated with MEV-based OVA vaccine (see Examples 3-10) either with intramuscular injection (IM subgroup) or per os administration (PO subgroup) starting from day 1. Tumor challenge with either B16-OVA cells (2×10⁵ in 100 μL) or E.G7-OVA cells (2×10⁶ in 100 μL) is performed on day 27 as described above. The control groups receive the same amount of MEVs non-loaded with any cargo and administered with the same route. Tumor size is measured until the endpoint.

### C. Therapeutic Vaccination Scheme

[1013] The animals (12 mice per group) are injected with either B16-OVA cells (2×10⁵ in 100 μL) or E.G7-OVA cells (2×10⁶ in 100 μL) on day 0 as described above. MEV-based OVA vaccine (see Examples 3-10) is administered on days 3, 7, 10, and 17, either with intramuscular injection (IM subgroup) or per os administration (PO subgroup). The control groups receive the same amount of MEVs non-loaded with any cargo and administered with the same route. Tumor size is measured until the endpoint.

### Example 17

### Preparation of Freeze-Dried MEV Formulations for Intramuscular (IM) and Oral (PO) Administration.

[1014] After isolation, purification, and loading (as described above), MEVs are dialyzed with 20 mM potassium phosphate buffer in Slide-A-Lyzer MINI dialysis cassettes (20K MWCO; Thermo Fisher Scientific). After dialysis, MEVs are filtered through a 0.2 μm PES membrane syringe filter (VWR International) and mixed 1:1 with stabilizer stock solutions to match the following final buffer (A or B), surfactant (A or B) and cryoprotectant (A or B) concentrations:
[1015] buffer A: 10 mM sodium phosphate (Sigma-Aldrich), pH 7.4;
[1016] buffer B: 10 mM potassium phosphate (Sigma-Aldrich), pH 7.4;
[1017] surfactant A: 0.02% polyvinylpyrrolidone (Kollidon 17 PF, BASF);
[1018] surfactant B: 0.02% poloxamer 188 (Kolliphor P188, BASF)
[1019] cryoprotectant A: 5% polyvinylpyrrolidone (Kollidon 17 PF, BASF);
[1020] cryoprotectant B: 5% sucrose (Sigma-Aldrich).

[1021] 2R glass vials (Fiolax clear, Schott) with igloo rubber stoppers (B2-TR coating, West Pharmaceutical Services) are cleaned with Highly Purified Water (HPW) and dried for 8 h at 60° C. The samples are lyophilized in 2R vials with 200 μL fill volume. Lyophilization is performed on a pilot-scale freeze-dryer (LyoStar 3). After an equilibration step at −5° C. for 15 min, the samples are frozen at −1° C. min⁻¹ to −50° C. and held for 120 min. Primary drying is performed at −20° C. and 40 mTorr with manometric end point determination. Secondary drying is performed at 20° C. and mTorr for 8 hours. Samples are stoppered under slight vacuum at 450 Torr nitrogen, and vials are crimped with aluminum seals. The lyophilizates are stored at room temperature (25° C.) until use. For reconstitution, 190 μL of HPW is added to each vial. The vials are shaken gently to ensure wetting of the complete lyophilizate.

[1022] Upon reconstitution of the freeze-dried formulations, MEVs are evaluated for shape, size and homogeneity characteristics as described in Example 2. The cargo content is quantified and characterized as described in Example 4. The reconstituted formulations are used for intramuscular and oral immunization studies as described in Examples 6-13.

### Example 17A

### Inhibition or Stimulation of Toll Like Receptors (TLR) Using MEV-Mediated Delivery in Macrophage Cells In Vitro

[1023] Toll-like receptors have a crucial role in the detection of microbial infection in mammals and insects. In mammals, the TLRs recognize conserved products unique to microbial metabolism. This specificity allows the Toll proteins to detect the presence of infection and to induce activation of inflammatory and antimicrobial innate immune responses. Recognition of microbial products by Toll-like receptors expressed on dendritic cells triggers functional maturation of dendritic cells and leads to initiation of antigen-specific adaptive immune responses.

[1024] Toll-like receptors (TLRs) are the important mediators of inflammatory pathways in the gut and the TLRs thereby play a major role in mediating the immune responses towards a wide variety of pathogen-derived ligands and link adaptive immunity with the innate immunity. MEVs have the capacity to efficiently penetrate cells and deliver their payload inside the cells. This ability of MEVs provides a way to modulate intracellular TLRs and to thereby stimulate intracellular pathways driven by TLRs. MEVs loaded with agonists or antagonists of TLRs can be used to target intracellular TLRs and deliver the payload in the intracellular compartments where TLRs are located (see, FIGS. 17A and 17B, which show MEVs and their interactions with TLRS and ligands).

### A. Cell Cultures:

### THP1-Derived Macrophage Culture

[1025] The ATCC® human monocyte THP-1 cell line is cultured in RPMI-1640 medium supplemented with 10% FBS, 2 mM L-glutamine, 100 U/mL penicillin, 100 μg/mL streptomycin, and 0.05 mM 2-mercaptoethanol. THP-1 monocytes are differentiated into M0 macrophages (M0-M). The cells are seeded at 1×10⁵ cells/mL and incubated at 37° C. with 5% CO₂ for 48 h in the presence of 50 ng/mL of PMA; then, the conditioned medium with PMA are removed and replaced with fresh medium for 3 days for cell recovery. Macrophage maturations are assessed by flow cytometry. After five days of culture, the cells are harvested and stained for CD68, a marker of mature macrophages, using the antihuman monoclonal antibody (mAb) anti CD68 PE (clone Y1/82A) and its isotype control PE Mouse IgG2b, K Isotype Ctrl Antibody (clone MPC-11). The expression of CD68 in THP-1-derived macrophages are assessed using a flow cytometer. At least 30,000 cells are acquired, and the two-fold increase in mean fluorescence intensity (MFI) of CD68 compared with the isotype control are considered successful maturation.

### RAW 264.7 Macrophage Culture

[1026] RAW 264.7 cells are obtained from ATCC®. Cells are maintained in D10 and passaged every three days when more than 80% confluent. In preparation for phagocytosis assays, cells are harvested and centrifuged at room temperature for 7 min at 1100 rpm using an IEC clinical benchtop centrifuge, re-suspended in R10, counted, and viability assessed using trypan blue dye exclusion (Sigma-Aldrich). Viability in all experiments is >90%.

### B. Reagents

[1027] TLR ligands are dsRNA: (polyadenylic-polyuridilyc acid (polyA:U)); (polyinosinic:polycytidylic acid (Poly I:C)); antivirals (as R848, R837, CL075, and CL264); taxol; flagellin; the flagellin-mimetic peptide flp22 (peptide from flagellin); or unmethylated CpG motif oligonucleotides (ODN class A, class B, and class C).

[1028] For phagocytosis assays, macrophages are cultured in sterile tissue culture medium (R10), composed of RPMI 1640 medium (Life Technologies, Burlington, ON), supplemented with 10% heat-inactivated fetal calf serum (Life Technologies, Burlington, ON), 100 U/mL penicillin (Life Technologies, Burlington, ON), 100 μg/mL streptomycin (Life Technologies, Burlington, ON), 25 mM N-2-hydroxyethylpiperazine-NV-2-ethanesulphonic acid (HEPES, Life Technologies, Burlington, ON) and 10 mM L-glutamine (Life Technologies, Burlington, ON). Dulbecco's Modified Eagles Medium (DMEM) (Life Technologies, Burlington, ON), supplemented in the same way as the RPMI, to form D10, are used for growth of RAW 264.7 macrophages.

[1029] MEVs were labeled with pKH26 as described in Example 3 or MEVs were loaded with different payloads as describe below.

### C. Loading of MEVs

[1030] MEVs are loaded with different ligands of TLRs as described herein (see, also, International PCT application No PCT/EP2022/07037). The TLR ligands included: dsRNA (polyadenylic-polyuridilyc acid (poly(A:U)); Polyinosinic:polycytidylic acid (Poly (I:C) HMW or Poly(I:C) LMW); antivirals (as R848, R837, CL075, and CL264); taxol; flagellin; the flagellin-mimetic peptide flp22 (peptide from flagellin); or unmethylated CpG motif oligonucleotides (ODN class A, class B, and class C), which are TLR3 (dsRNA (polyadenylic-polyuridilyc acid (poly(A:U)); Polyinosinic:polycytidylic acid (Poly (I:C)), TLR4 (taxol); TLR5 (flagellin; flagellin-mimetic peptide flp22 (peptide from flagellin)), TLR7 and TLR8 (antivirals such as R848, R837, CL075, and CL264), and TLR9 (unmethylated CpG motif oligonucleotides) agonists.

### D. MEVs Internalization

[1031] The THP-1 or RAW cells were treated at different time points with MEVs labeled with pKH26 or loaded with TLR ligands at different timepoints. 24 hours after the seeding, cells were counted and a mixture of cell culture media with different the different treatments were prepared: TLR ligands or MEVs (non-loaded or loaded with different TLR ligands). The final concentration of MEVs were between 200 and 1,000 loaded-MEVs/cell, the TLR ligands alone is shown in the results, figures, or tables.

[1032] Internalization of MEVs by M0 Macrophages: MEVs were labeled with PKH26 Red Fluorescent Cell Linker Kits following the methods described herein (see, also PCT/EP2022/070371 and U.S. provisional application Ser. No. 63/349,006). The labeled MEVs were incubated with THP-1 or RAW cells for 1 h, 3 h, 6 h, 16 h, and 24 h at 37° C. with 5% CO₂. After incubation, the cells are fixed with PFA 4%, permeabilized with 0.1% Triton™ X-100, and stained with Actin Green, USA, 1 drop/mL of PBS) that binds actin with high affinity, and the nuclei are stained with Hoechst, dilution 1:1000). The samples are analyzed by confocal microscopy.

[1033] Internalization of MEVs by M0 Macrophages: MEVs loaded with different payloads as described above and following the methods described above. The loaded MEVs were incubated with THP-1 or RAW cells for 1 h, 3 h, 6 h, 16 h, and 24 h at 37° C. with 5% CO₂. After incubation, the cells are fixed with PFA 4%, permeabilized with 0.1% Triton™ X-100, and stained with Actin Green, USA, 1 drop/mL of PBS) that binds actin with high affinity, and the nuclei are stained with Hoechst, dilution 1:1000). The samples are analyzed by confocal microscopy.

### E. Macrophage Phagocytosis Assay

[1034] For phagocytosis assays, 1×10⁵ RAW 264.7 macrophages in R10 medium are plated onto sterile 4 well chambered Millicell® EZ SLIDES glass culture slides (Millipore Corporation, Bedford, MA), and macrophages allowed to adhere in a humidified 5% CO₂ incubator for 30 min at 37° C. Zymosan particles are added to the cells at a zymosan to macrophage ratio of 10:1. Phagocytosis is allowed to proceed for 1 h at 37° C. in a humidified 5% CO₂ incubator. In experiments where the effects of TLR ligands are assessed, cells are incubated in the presence of these TLR receptor agonists for 16 h prior to addition of zymosan. For experiments assessing scavenger receptor blockade, inhibitors are added 15 min prior to addition of zymosan. Phagocytosis is terminated by vigorously washing off non-ingested particles with warm R10 three times. Glass slides are air-dried for 15 min, stained using Wright's stain (Sigma-Aldrich), and slides examined by light microscopy at X600 magnification using a Nikon® Eclipse 50i photomicroscope. Phagocytosis is determined from photomicrographs at X600 magnification by counting at least 200 macrophages in 16 different fields of view for each experimental treatment. Phagocytosis is assessed as the mean number of particles per cell (MNP). Phagocytic index (PI) is used to express overall phagocytosis and determined as percentage of phagocytic cells multiplied by MNP (PI=percentage phagocytosis X MNP). Photomicrographs of cells for illustrations are taken either unstained by phase contrast at ×400 magnification using an inverted microscope (Nikon® Eclipse TE2000S), or stained cells captured at ×600 magnification using a Nikon® Eclipse 50i photomicroscope.

### F. Macrophage Cell Surface Receptor Expression

[1035] To assess the effect of LPS on macrophage cell surface receptor expression, 1×10⁵ macrophages cells are cultured in R10 alone or pretreated overnight with LPS at 10 ng/mL. Wells are washed with Ca2⁺ and Mg2⁺ free PBS, and then the cells are detached using Accutase™ (BD Bioscience, Mississauga, ON). Cell surface expression of Class A scavenger receptors (SR-A) and the lectin receptor Dectin-1 is detected using FITC-labelled IgG antibodies against the respective surface proteins, and this is compared with fluorescence of appropriate isotype-matched control antibodies. Cells are stained using either anti SR-A IgG (1 μg/mL) (isotype control IgG2) or anti Dectin-1 IgG (1 μg/mL) (isotype control IgG2). All antibodies and controls are obtained from Bio-Rad (Raleigh, NC). Antibodies are added to 100 μl of cells re-suspended in staining buffer composed of PBS, 2% bovine serum albumin and 0.1% sodium azide, to a concentration of 10⁶ cells/mL. During staining, cells are incubated on ice and kept in the dark for 45 min. Thereafter, cells are washed, re-suspended in 200 μl of stain buffer, and analyzed using a BD FACSJazz™ system (BD Biosciences, San Jose, CA) and Flow-Jo software (Tree Star, Ashland, OR). Forward and side scatter are used to discriminate live macrophages prior to analysis of SR-A and Dectin-1 expression.

### G. Cytotoxicity Determination

### MTT (3-[4,5-Dimethylthiazol-2-yl]-2,5 Diphenyl Tetrazolium Bromide) Assay

[1036] Cell viability is determined by an MTT assay as previously described. The THP-1 cells are seeded in triplicate in 48-well plates; 24 h post-seeding, the cells are treated with MEVs for 24 and 48 h. The absorbance is measured by an ELISA reader at 540 nm. Values are expressed as a percentage of cell growth versus that in the control (untreated cells).

### H. Western Blotting:

[1037] Total proteins from the THP-1 cells or RAW 264.7 treated with loaded MEVs as described above were isolated and analyzed by SDS-PAGE followed by Western Blotting. The primary antibodies used in the experiments are as follows: anti-NF-kB antibody (Novus, NB100-2176, dilution 1:500), anti-phosphorylated-NF-kB antibody p65 (S536) (Cell signaling, 3033, dilution 1:1000), anti-IRF-3 antibody (EPR24184) (ABCAM,ab68481, dilution 1:500), anti-phosphorylated-IRF-3 antibody (Ser396) (E.875.8) (Thermo Fischer Scientific, MA (−14947, dilution 1:1000), anti-PD-L1 antibody (Abcam, Cambridge, UK, ab213524, dilution 1:1000; antipSTAT3 (R&D System, AF4607-SP, dilution 1:500), anti-STAT3 (Novus Biologicals, Denver, CO, USA, NBP2-24463, dilution 1:1000), anti-HSP70 (Novus Biologicals, NB600-1469, dilution 1:1000), anti-HSC70 (Santa Cruz, Dallas, TX, USA, sc-7298, dilution 1:500), anti-Calnexin (Santa Cruz, sc-23954, dilution 1:500), anti-Tubulin (Santa Cruz, sc-398103, dilution 1:1000), anti-P Actin (Santa Cruz, sc-81178, dilution 1:1000), anti-GAPDH (Santa Cruz, sc-47724, dilution 1:1000). After overnight incubation with the primary antibodies at 4° C., the membranes are incubated with HRP-conjugated secondary antibody (Thermo Fisher Scientific) for 1 h, at 4° C.; the chemiluminescent signal is detected using a ChemiDoc™ MP imaging system (Bio-Rad).

### I. Real-Time PCR

[1038] The THP-1 and RAW cells are seeded in 12 well-plates at 1×10⁵ cells/mL and differentiated in M0 macrophages, as described above; the cells then are treated with MEVs for 6 and 24 h. At the end of the treatments, total RNA is extracted using QIAGEN® kit. The RNA is reverse transcribed to cDNA using the High-Capacity cDNA Reverse Transcription kit. Then, the cDNA is subjected to quantitative real-time reverse transcriptase polymerase chain reaction (RT-PCR) analysis. The sequences of the primers used are indicated in Table 9, below.

TABLE 9
List of primers used for Real-Time PCR.

| | | SEQ | | SEQ |
|---|---|---|---|---|
| | | ID | | ID |
| Primers | Forward | NO. | Reverse | NO. |
| GAPDH | ATGGGGAAGGTGAAGGTCG | 150 | GGGTCATTGATGGCAACAATAT | 151 |
| PD-L1 | TCACGGTTCCCAAGGACCTA | 152 | AGGTCTTCCTCTCCATGCAC | 153 |
| IL-6 | GGTACATCCTCGACGGCATC | 154 | GTGCCTCTTTGCTGCTTTCAC | 155 |
| | T | | | |
| IL-1β | ACAGATGAAGTGCTCCTTCC | 156 | GTCGGAGATTCGTAGCTGGAT | 157 |
| | A | | | |
| TNF-α | CCAGGCAGTCAGATCATCTTCTC | 158 | AGCTGGTTATCTCTCAGCTCCAC | 159 |

[1039] Real-time PCR is performed using Step One Real-time PCR System Thermal Cycling Block (Applied Biosystem) in a 20 μL reaction containing 300 nM of each primer, 2 μL of template cDNA, and 18 μL of 2×SYBR® Green I Master Mix. The PCR is run at 95° C. for 20 s followed by 40 cycles of 95° C. for 3 s and 60° C. for 30 s. GAPDH is used as the endogenous control. Relative changes in gene expression between control and treated samples are determined using the ΔCt method.

### J. ELISA Test

[1040] The amount of IL-6 secreted in the culture medium of THP-1 cells treated with MEVs was determined using a human TL-6 ELISA kit (Invitrogen KAC1261). For cells in suspension (THP-1), 90,000 cells were seeded per 0.5 mL of media in a 12-well plate. After 24 hours, cells were counted and a mixture of cell culture media with different TLR ligands or MEVs (non-loaded or loaded with different TLR ligands) were prepared with a final concentration of MEVs between 200 and 1,000 loaded-MEVs/cell. Cells were treated for 48 hrs. then the supernatants were collected. Measurements were carried out as per the manufacturer's protocol (Invitrogen KAC1261).

[1041] The amount of IFNα secreted in the culture medium of THP-1 cells treated with MEVs was determined using a human IFNα ELISA kit (PBL-Assay Science, 41135-1). For cells in suspension (THP-1), 90,000 cells were seeded per 0.5 mL of media in a 12-well plate. After 24 hours, cells were counted and a mixture of cell culture media with different TLR ligands or MEVs (non-loaded or loaded with different TLR ligands) were prepared with a final concentration of MEVs between 200 and 1,000 loaded-MEVs/cell. Cells were treated for 48 hrs. then the supernatants were collected. The ELISA was performed according to the manufacturer's instructions.

[1042] For RAW cells the cytokines secreted by cells treated with MEVs loaded or non-loaded was determined using Luminex Multiplex Immunoassay (by R&D System, Procarta Plex Mouse Basic kit (EOX010-20440-901) and Procarta Plex Mouse TGF beta1 simplex (EPX01A-20608-901)). The assays were performed according to the manufacturer's instructions. All treatments are described in the figures and tables.

### K. Results:

1. Internalization of MEVs into Human Epithelial Cells In Vitro

[1043] The MEVs labeled with PKH26 or loaded with different payloads either agonist of TLRs or proteins as ovalbumin (OVA) or mRNAs coding for OVA were incubated at different time points and were either internalized or phagocyted by human monocytes TPH-1 cells or mice monocytes/macrophages M0 RAW 264.7 cells showing the ability of MEVs to penetrate to cells and to deliver its payloads (oligonucleotides, mRNAs, proteins, dsRNAs).

[1044] FIG. 27A shows the internalization of MEVs labeled with PKH26 into RAW cells at different timepoints. FIG. 27B shows the kinetics of internalization of MEVs into Raw cells. These results on human cells in vitro confirm previous observations made in vivo in mice that showed the internalization of MEVs labeled with PKH26 into idiocytes (tissular macrophages) and dendritic cells in the GALT. (Figures of example 6B).

[1045] FIG. 28 shows the delivery of the payload into RAW cells in excellent correlation with the MEVs internalization shown in FIGS. 27A-27B.

2. Payload Biological Activity after Delivery by MEVs into Human Epithelial Cells

[1046] The stimulation of the phosphorylation of intracellular markers as NF-Kb and IRF-3 molecules was observed after the incubation at different timepoints with MEVs loaded with different payloads agonist of TLR, in RAW264.7 cells showing an effective biological activity of the payload when deliver by MEVs into the cells. FIGS. 29A-29B show the results of the activation of NF-Kb intracellular pathway after delivery of TLR-3 agonist by MEVs into RAW264.7 cells.

[1047] After incubation for 24 hs with MEVs loaded with TLR agonist RAW264.7 cells are morphological differentiated into M1/M2 macrophages and/or dendritic cells. FIGS. 30A-30B show the results.

### L. Conclusions:

[1048] MEVs can penetrate macrophage cells (by internalization or phagocytosis) and deliver their payloads. When the payloads are agonist or antagonist of TLR, once delivered, they bind to the TLR thus inducing the activation/deactivation of an intracellular pathway. In particular, for TLRs that are not located in the cellular membrane but in intracellular endosome membranes (such as TLR3, TLR5, TLR7, TLR8, and TLR9), MEVs can reach such endosomes and deliver their payloads into the endosomes thus allowing the payloads to stimulate the endosomal TLRs. The stimulation of TLRs induces intracellular pathways involved in the modulation of inflammatory reaction, modulation of imbalance of cytokines, tissular reparation, and innate and or adaptative immune response.

### Example 17B

### Inhibition or Stimulation of Toll Like Receptors (TLR) Using MEV-Mediated Delivery in Human Epithelial Cells In Vitro

[1049] Toll-like receptors have a crucial role in the detection of microbial infection in mammals and insects. In mammals, these receptors have evolved to recognize conserved products unique to microbial metabolism. This specificity allows the Toll proteins to detect the presence of infection and to induce activation of inflammatory and antimicrobial innate immune responses. Recognition of microbial products by Toll-like receptors expressed on dendritic cells triggers functional maturation of dendritic cells and leads to initiation of antigen-specific adaptive immune responses.

[1050] In particularly, Toll-like receptors (TLRs) are the important mediators of inflammatory pathways in the gut which play a major role in mediating the immune responses towards a wide variety of pathogen-derived ligands and link adaptive immunity with the innate immunity.

[1051] MEVs have the capacity to efficiently penetrate cells and deliver their payload inside those cells. This ability of MEVs opens the possibility to address the intracellular TLRs and stimulate intracellular pathways driven by TLRs. MEVs loaded with agonists or antagonists of TLRs can be used to target intracellular TLRs and deliver the payload in the intracellular compartments where TLRs are located, as described in FIGS. 17A and 17B.

### A. Cell Cultures

[1052] BEAS-2B human bronchial epithelial cells were obtained from the American Type Culture Collection (ATCC) (CRL-9609). The cells were cultured in BEBM Basal Medium (CC-3171, Lonza) supplemented with BEGM SingleQuots Supplement Pack (CC-4175, Lonza) and 100 U/ml of penicillin, and 100 g/ml of streptomycin (15140122, Gibco) at 37° C. under 5% CO₂. Non-transformed human small intestinal epithelial FHs-74 Int cells were also obtained from ATCC (CCL-241). The cells were maintained in Hybri-Care medium (ATCC-46-X) supplemented with 10% heat-inactivated fetal bovine, and 100 μg/ml of streptomycin (15140122, Gibco), and 30 ng/ml EGF (SRP3027-500 μG, SIGMA) at 37° C. under 5% CO₂. Non-transformed human large intestinal epithelial FHC cells were also obtained from ATCC (CRL-1831). The cells were maintained in DMEM/F-12 media (31330038, Gibco) supplemented with 10% heat-inactivated fetal bovine, 100 U/ml of penicillin −100 μg/ml of streptomycin (15140122, Gibco), 20 ng/ml EGF (SRP3027-500 μG, SIGMA), 10 ng/ml Cholera Toxin (C8052-1MG, SIGMA), 1 mM HEPES (H0887, SIGMA), 5 μg/ml Insulin (I9278), 5 μg/ml Transferrin (T8158, SIGMA), 100 ng/ml Hydrocortisone (352450050, Thermo Scientific) at 37° C. under 5% CO₂.

### B. Reagents

[1053] TLR ligands are dsRNA: (polyadenylic-polyuridilyc acid (polyA:U)); (polyinosinic:polycytidylic acid (Poly I:C)); antivirals (as R848, R837, CL075, and CL264); taxol; flagellin; the flagellin-mimetic peptide flp22 (peptide from flagellin); or unmethylated CpG motif oligonucleotides (ODN class A, class B, and class C).

[1054] For phagocytosis assays, macrophages are cultured in sterile tissue culture medium (R10), composed of RPMI 1640 medium (Life Technologies, Burlington, ON), supplemented with 10% heat-inactivated fetal calf serum (Life Technologies, Burlington, ON), 100 U/mL penicillin (Life Technologies, Burlington, ON), 100 μg/mL streptomycin (Life Technologies, Burlington, ON), 25 mM N-2-hydroxyethylpiperazine-NV-2-ethanesulphonic acid (HEPES, Life Technologies, Burlington, ON) and 10 mM L-glutamine (Life Technologies, Burlington, ON). Dulbecco's Modified Eagles Medium (DMEM) (Life Technologies, Burlington, ON), supplemented in the same way as the RPMI, to form D10, are used for growth of RAW 264.7 macrophages.

[1055] MEVs labeled with pKH26 as described in Example 3 or MEVs loaded with different payloads as describe below.

### C. Loading of MEVs

[1056] MEVs are loaded with different ligands of TLRs as described herein (see, also, International PCT application No PCT/EP2022/07037). The TLR ligands included: dsRNA (polyadenylic-polyuridilyc acid (poly(A:U)); Polyinosinic:polycytidylic acid (Poly (I:C) HMW or Poly(I:C) LMW); antivirals (as R848, R837, CL075, and CL264); taxol; flagellin; the flagellin-mimetic peptide flp22 (peptide from flagellin); or unmethylated CpG motif oligonucleotides (ODN class A, class B, and class C), which are TLR3 (dsRNA (polyadenylic-polyuridilyc acid (poly(A:U)); Polyinosinic:polycytidylic acid (Poly (I:C)), TLR4 (taxol); TLR5 (flagellin; flagellin-mimetic peptide flp22 (peptide from flagellin)), TLR7 and TLR8 (antivirals such as R848, R837, CL075, and CL264), and TLR9 (unmethylated CpG motif oligonucleotides) agonists.

### D. MEVs Internalization

[1057] The human epithelial cells were treated at different time points with MEVs labeled with PKH26 or loaded with TLR ligands at different timepoints. 24 hours the seeding, cells were counted and a mixture of cell culture media with different the different treatments were prepared: TLR ligands or MEVs (non-loaded or loaded with different TLR ligands). The final concentration of MEVs were between 200 and 1,000 loaded-MEV/cell, the TLR ligands alone is shown in the results figures or tables.

[1058] Internalization of MEVs by human epithelial cells by MEVs were labeled with PKH26 Red Fluorescent Cell Linker Kits following the methods described herein (see, also PCT/EP2022/070371 and U.S. provisional application Ser. No. 63/349,006). The labeled MEVs were incubated with human epithelial cells for 1 h, 3 h, 6 h, 16 h, and 24 h at 37° C. with 5% CO₂. After incubation, the cells are fixed with PFA 4%, permeabilized with 0.1% Triton™ X-100, and stained with Actin Green, USA, 1 drop/mL of PBS) that binds actin with high affinity, and the nuclei are stained with Hoechst, dilution 1:1000). The samples are analyzed by confocal microscopy.

[1059] Internalization of MEVs by human epithelial cells by MEVs loaded with different payloads as described above and following the methods described above. The loaded MEVs were incubated with human epithelial cells for 1 h, 3 h, 6 h, 16 h, and 24 h at 37° C. with 5% CO₂. After incubation, the cells are fixed with PFA 4%, permeabilized with 0.1% Triton™ X-100, and stained with Actin Green, USA, 1 drop/mL of PBS) that binds actin with high affinity, and the nuclei are stained with Hoechst, dilution 1:1000.

### E. Immunofluorescence

[1060] Cells were grown on coverslips to reach 70-80% confluency then directly with 4% paraformaldehyde (PFA) in PBS for 20 min at room temperature. Cells were permeabilized by with 0.2% Triton X100-PBS for 10 min then transferred into 0.1% Tween-PBS for 5 min. Coverslips were then incubated with primary antibodies in 0.1% Tween-5% BSA-PBS for 1-2 h, washed with 0.1% Tween-PBS, then incubated with secondary antibodies in Tween 0.1%-BSA 5%-PBS for 1 h. All the incubations were carried out in darkness in a humidified chamber at room temperature. Finally, coverslips are washed again with 0.1% Tween-PBS, incubated with Hoechst (SIGMA-Aldrich, 94403) to label DNA for 5 min, and then mounted on glass slides with Prolong (Life Technologies). Cells were analyzed by fluorescence microscopy. Antibodies against pNF-kB p65 (S536) (Cell signaling, 3033) were used.

### F. Cytotoxicity Determination

[1061] MTT (3-[4,5-Dimethylthiazol-2-yl]-2,5 Diphenyl Tetrazolium Bromide) Assay Cell viability is determined by an MTT assay as previously described. The human epithelial cells are seeded in triplicate in 48-well plates; 24 h post-seeding, the cells are treated with MEVs for 24 and 48 h. The absorbance is measured by an ELISA reader at 540 nm. Values are expressed as a percentage of cell growth versus that in the control (untreated cells).

### G. Western Blotting:

[1062] Total proteins from human epithelial cells treated with loaded MEVs as described above were isolated and analyzed by SDS-PAGE followed by Western Blotting. The primary antibodies used in the experiments are as follows: anti-NF-kB antibody (Novus, NB100-2176, dilution 1:500), anti-phosphorylated-NF-kB antibody p65 (S536) (Cell signaling, 3033, dilution 1:1000), anti-IRF-3 antibody (EPR24184) (ABCAM,ab68481, dilution 1:500), anti-phosphorylated-IRF-3 antibody (Ser396) (E.875.8) (Thermo Fischer Scientific, MA (−14947, dilution 1:1000), anti-PD-L1 antibody (Abcam, Cambridge, UK, ab213524, dilution 1:1000; antipSTAT3 (R&D System, AF4607-SP, dilution 1:500), anti-STAT3 (Novus Biologicals, Denver, CO, USA, NBP2-24463, dilution 1:1000), anti-HSP70 (Novus Biologicals, NB600-1469, dilution 1:1000), anti-HSC70 (Santa Cruz, Dallas, TX, USA, sc-7298, dilution 1:500), anti-Calnexin (Santa Cruz, sc-23954, dilution 1:500), anti-Tubulin (Santa Cruz, sc-398103, dilution 1:1000), anti-P Actin (Santa Cruz, sc-81178, dilution 1:1000), anti-GAPDH (Santa Cruz, sc-47724, dilution 1:1000). After overnight incubation with the primary antibodies at 4° C., the membranes are incubated with HRP-conjugated secondary antibody (Thermo Fisher Scientific) for 1 h, at 4° C.; the chemiluminescent signal is detected using a ChemiDoc™ MP imaging system (Bio-Rad).

### H. Real-Time PCR

[1063] The human epithelial cells are seeded in 12 well-plates at 1×10⁵ cells/mL and differentiated in M0 macrophages, as described above; the cells then are treated with MEVs for 6 and 24 h. At the end of the treatments, total RNA is extracted using QIAGEN® kit. The RNA is reverse transcribed to cDNA using the High-Capacity cDNA Reverse Transcription kit. Then, the cDNA is subjected to quantitative real-time reverse transcriptase polymerase chain reaction (RT-PCR) analysis. The sequences of the primers used are indicated in Table 9, above.

[1064] Real-time PCR is performed using Step One Real-time PCR System Thermal Cycling Block (Applied Biosystem) in a 20 μL reaction containing 300 nM of each primer, 2 μL of template cDNA, and 18 μL of 2×SYBR® Green I Master Mix. The PCR is run at 95° C. for 20 s followed by 40 cycles of 95° C. for 3 s and 60° C. for 30 s. GAPDH is used as the endogenous control. Relative changes in gene expression between control and treated samples are determined using the ΔCt method.

### L. ELISA Test

[1065] The amount of IL-6 secreted in the culture medium of epithelial cells treated with MEVs was determined using a human IL-6 ELISA kit (Invitrogen KAC1261). For adherent cells (FHs-74 and FHC), stimulations were carried out in 12-well plates with cells seeded at 40,000 cells/well. After 24 hours, cells were counted and a mixture of cell culture media with different TLR ligands or MEVs (non-loaded or loaded with different TLR ligands) were prepared with a final concentration of MEVs between 200 and 1,000 loaded-MEV/cell. Cells were treated for 48 hrs. then the supernatants were collected. Measurements were carried out as per the manufacturer's protocol (Invitrogen KAC1261).

[1066] The amount of IFNα secreted in the culture medium of THP-1 cells treated with MEVs was determined using a human IFNα ELISA kit (PBL-Assay Science, 41135-1). For adherent cells (FHs-74 and FHC), stimulations were carried out in 12-well plates with cells seeded at 40,000 cells/well. After 24 hours, cells were counted and a mixture of cell culture media with different TLR ligands or MEVs (non-loaded or loaded with different TLR ligands) were prepared with a final concentration of MEVs between 200 and 1,000 loaded-MEV/cell. Cells were treated for 48 hrs. then the supernatants were collected. The ELISA was performed according to the manufacturer's instructions.

### J. Results:

1. Internalization of MEVs into Human Epithelial Cells In Vitro

[1067] The MEVs labeled with PKH26 or loaded with different payloads either agonist of TLRs or proteins as ovalbumin (OVA) or mRNAs coding for OVA were incubated at different time point and internalized into epithelial cells from small intestine, colon, and lung, showing the ability of MEVs to penetrate to epithelial cells and to deliver its payloads (oligonucleotides, mRNAs, proteins, dsRNAs). FIGS. 31A-E show these results in FHs-74, FHC, and BEAS-2B cells small intestinal, colon and lung epithelial cells, respectively. These results confirm on human cells in vitro, the observation previously made in vivo in mice, for both respiratory and intestinal epithelial (see Figures of Examples 6 and 7, for MEVs internalization and payload delivery, respectively).

2. Payload Biological Activity after Delivery by MEVs into Human Epithelial Cells

[1068] The stimulation of the phosphorylation of intracellular markers as NF-Kb and IRF-3 molecules was observed after the incubation at different timepoints with MEVs loaded with different payloads agonist of TLR, in human epithelial cells. These results (FIGS. 32 A-E) confirm, human cells in vitro, the observations made in vivo in mice, for respiratory and for intestinal epithelial (Figures of Example 7 for payload delivery, expression, and biological activity).

### K. Conclusions:

[1069] MEVs can penetrate epithelial cells, including intestinal and respiratory epithelial cells, and deliver their payloads. When the payloads are agonists or antagonists of a TLR, the payloads delivered by MEVs bind to the TLRs activating or disactivating an intracellular pathway. For TLRs, such as TLR3, TLR5, TLR7, TLR8, and TLR9, that are not located in the cellular membrane but are located in intracellular endosome membranes, MEVs reach such endosomes and deliver their payloads into the endosomes, thus allowing the payloads to stimulate (or inhibit, depending upon payload) the endosomal TLRs. The stimulation of TLRs induces intracellular pathways involved in the modulation of inflammatory reaction, modulation of imbalance of cytokines, tissular reparation, and innate and or adaptative immune response. Inhibition by antagonists inhibits such pathways.

### Example 18

### Evaluation of Toxicity of MEVs in Mice

[1070] Experiments were performed to assess the signs of MEV toxicity in vivo using Balb/C mouse model after oral and intratracheal administration.

### A. Analysis of MEV Toxicity In Vivo:

[1071] Toxicity was evaluated in several ways: clinical signs, body weights, hematological analysis, biochemical analysis, histological analysis on main organs (liver, spleen, kidney, lung and brain). The MEV samples were stored at −80° C. and thawed just prior to in vivo administrations. After thawing, each sample was mixed by vigorous vortexing for 1-2 minutes. Male Balb/C mice at 5 weeks of age and with a mass about 20 g each, were used. Animals were acclimatized. Animals were housed in polyethylene cages (<5 animals/cage), in a controlled environment with 12:12 light-dark at the temperature of 24±1° C. (mean±SD) and fed once daily with an adapted pelleted feed. Water was offered ad libitum. The animals were randomly assigned to experimental groups and acclimatized for at least 7 days before the initiation of the designed study. The experimental groups are described in Table 10, below.

[1072] The experiment was designed to determine the eventual toxicity of the test compound after its administration in mice through exemplary routes including oral, and respiratory tract (intratracheal) routes. As described above, male Balb/C mice, with a mass about 20 g each, were used. Animals were acclimatized. After a test item is administered, all mice are closely monitored for 10 days.

TABLE 10
Experimental groups in MEV toxicity study.

| | | Route of | |
|---|---|---|---|
| Group no. | Group type | administration | MEV dosage |
| 1 | Vehicle control | PO (oral) | — |
| | (PBS) | | |
| 2 | Experimental | PO (oral) | 4 × 10exp11 per animal |
| 3 | Experimental | PO (oral) | 1 × 10exp12 per animal |
| 4 | Vehicle control | IT (intratracheal) | — |
| | (PBS) | | |
| 5 | Experimental | IT (intratracheal) | 4 × 10exp11 per animal |

### Clinical Examination

[1073] Daily clinical examination of all animals included observation of behavior and signs of suffering (cachexia, weakening, difficulty for moving or feeding, etc.); test item toxicity (hunching, convulsions), and other such parameters. Determination of body weight once a week for each animal, a body weight curve was designed (Mean+SD). Observation of acute reactions was done after administration of the tested compounds.

### Clinical Pathology Investigations

[1074] After the end of the in-life phase, all animals were euthanized. Clinical pathology investigations were performed at experiment termination.

### Blood Collection

[1075] The blood samples were collected from mice by intracardiac puncture into different vials. Aliquots of blood were collected for various clinical pathology investigations into tubes containing anticoagulants: for hematology analysis with K2 EDTA and for biochemistry analysis with lithium heparin.

### Clinical Chemistry

[1076] Plasma was separated after centrifugation of whole blood samples, 45000 rpm for 15 minutes and analyzed for the following parameters at the end of treatment for all animals. Clinical chemistry analysis parameters are indicated as: Alanine Aminotransferase (ALT), Aspartate Aminotransferase (AST), and Gamma-glutamyl transferase (GGT) in units per liter (U/L); Urea in g/L and Creatinine in mg/L.

### Hematology

[1077] The following hematological parameters were determined at the end of treatment of all animals: Hemoglobin (HGB) in g/L; Hematocrit (HCT) in L/L; Mean Corpuscular Volume (MCV) in fL; Eosinophils (EO) and MHCH (BASO) as 10⁹/L.

[1078] When animals are euthanatized, an autopsy is performed, and a careful macroscopic evaluation is performed. If any organs look abnormal, a detailed description and analysis is performed.

### Histological Analysis

[1079] Histological analysis is performed for the 5 following organs: Lung, Spleen, Liver, Kidney, and Brain. The organs are collected, weighed, macroscopically observed, fixed in 4% Paraformaldehyde (PFA) and paraffin-embedded, cut into 5-7 μM sections and then observed under a fluorescence microscope.

### Histopathological Scoring

[1080] Each H&E (hematoxylin- and eosin-stained) section was thoroughly examined histologically, and lesions observed were recorded in an Excel spreadsheet. Severity of lesions were graded (minimal, mild, moderate, or severe). Their distribution also was characterized, for example as focal, multifocal, focally extensive or diffuse, and by their localization.

### B. Toxicity Study Results: Clinical Examinations

[1081] The results of assessment of toxicity of MEVs in a mouse model after oral (PO) or intratracheal (IT) administration at different doses in 4 groups of mice for each parameter are shown in FIGS. 15A and 15B, which shows clinical chemistry and hematology in mice after administration (PO, IT) of MEV, respectively.

### Clinical Chemistry

[1082] As shown below, two parameters Urea and Creatinine did not change in all treated groups compared to control groups. The enzymes Alanine Aminotransferase (ALT) and Aspartate Aminotransferase (AST) shown random non-significant deviations. The parameter Gamma-glutamyl transferase value is detected at low level (<6) in all groups indicating a protocol error and are not presented.

[1083] The results of the clinical chemistry parameters do not indicate any toxicity at all tested doses in the mice either by oral or intratracheal administration.

### Hematology

[1084] The measured parameters were not significantly changed compared to controls, indicating that the MEVs do not result in toxicity. MEV toxicity was evaluated by (1) chemistry parameters: ALAT, ASAT, urea and creatine; and (2) by hematology parameters in four groups of mice: Group 1 mice were administered 100 μl of PBS by PO delivery; Group 2 mice were administered 100 μl of 4*10¹¹ MEWV mouse by PO delivery (bar with black and white tiles); Group 3 mice were administered 100 μl of 4*10¹² MEV/mouse by PO delivery (bars with vertical lines); Group 4 mice were administered 100 μl of 4*10¹¹ MEV/mouse by IT delivery. The results present blood parameters that can be altered when there is one or more of blood-, kidney-, and liver-related toxicity. Hematocrit, hemoglobin, eosinophil levels, RBC count, and volume (MCV) are hematologic parameters; urea and creatine are biochemical markers of kidney injury; ALAT (or ALT) and ASAT (or AST) are biochemical markers of liver injury. Alanine transaminase (ALT), also called alanine aminotransferase (ALAT), is a transaminase enzyme that occurs in plasma and in various body tissues, but most commonly in the liver. Elevated levels of ALT can be related to liver-related problems, such as hepatitis and/or liver damage. Aspartate transaminase (AST), also known as aspartate aminotransferase (ASAT), is another transaminase enzyme important in amino acid metabolism. Beyond liver toxicity, AST can be elevated also in diseases affecting other organs. Serum ALT level, serum AST level, and their ratio (AST/ALT ratio) are used clinically as biomarkers for liver health. In the instant study, no statistically significant differences between experimental groups in ALT and AST levels were observed (see, FIG. 15A).

[1085] Eosinophils (eosinophiles) are a variety of white blood cells and one of the immune system components responsible for combating multicellular parasites and certain infections in vertebrates. Eosinophils usually account for less than 7% of the circulating leukocytes. Beyond causes related to infection or parasitic infestation, elevated eosinophil levels (also known as eosinophilia) can be also a sign of allergic or atopic reactions. In the instant study no statistically significant differences between experimental groups in eosinophil levels were observed.

### Histology

[1086] The main organs were collected, fixed in 4% PFA, paraffin-embedded, cut into sections and stained with H&E.

### Lung

[1087] Histopathological changes observed in lung sections are primarily limited to minimal to mild focal to multifocal alveolar hemorrhages in 8/10 lung sections examined in animals receiving intratracheal negative control material and test item. Changes were relatively subtle and limited in some of the alveolar spaces. This observation was observed at comparable incidence and severity in negative control and treated animals.

### Kidney

[1088] Presence of a few basophilic tubules were observed in 1 animal treated PO with 4×10¹¹ MEV dose. This finding was minimal in severity and often is observed spontaneously at low incidence and severity in laboratory rodent animals. It is therefore considered as incidental in origin in the present study.

### Spleen, Liver, and Brain

[1089] No histopathological changes were observed in spleen, brain, or liver in all sections examined.

### Summary

[1090] The pulmonary changes observed in most animals receiving the experimental material intra-tracheally were considered not related to treatment. There was no treatment-related change observed in all organs examined, indicating that MEVs are not toxic to animals under the experimental conditions (see, Table 11).

TABLE 11
Histopathology results after administration
orally or intratracheally of MEVs

| Group | 1 | 2 | 3 | 4 | 5 |
|---|---|---|---|---|---|
| Organ | Brain | | | | |
| Histopathological Findings | | | | | |
| Number examined | 3 | 6 | 5 | 4 | 6 |
| Unremarkable | 3 | 6 | 5 | 4 | 6 |
| Organ | Spleen | | | | |
| Histopathological Findings | | | | | |
| Number examined | 3 | 6 | 6 | 4 | 6 |
| Unremarkable | 3 | 6 | 6 | 4 | 6 |
| Organ | Kidney | | | | |
| Histopathological Findings | | | | | |
| Number examined | 3 | 6 | 6 | 4 | 6 |
| Unremarkable | 3 | 5 | 6 | 4 | 6 |
| Basophilic tubules | | | | | |
| Minimal | 0 | 1 | 0 | 0 | 0 |
| Organ | Liver | | | | |
| Histopathological Findings | | | | | |
| Number examined | 3 | 6 | 6 | 4 | 6 |
| Unremarkable | 3 | 6 | 6 | 4 | 6 |
| Organ | Lung | | | | |
| Histopathological Findings | | | | | |
| Number examined | 3 | 6 | 6 | 4 | 6 |
| Unremarkable | 3 | 6 | 6 | 1 | 1 |
| Hemorrhage, alveolar | | | | | |
| Minimal | 0 | 0 | 0 | 2 | 4 |
| Mild | 0 | 0 | 0 | 1 | 1 |

### C. Conclusion

[1091] Regarding the clinical aspects, all the animals, at each time of the study, exhibited normal behaviors, body weight, water and food consumption. The clinical findings indicate general tolerance in the mouse model of the test MEV products. Under the experimental conditions, both negative controls (PBS) and MEV at concentration of 4*10¹¹ MEV/mouse or 4*10¹² MEV/mouse by oral administration and at concentration of 4*10¹¹ MEV/mouse by IT administration did not induce any abnormal, toxic effect on animals.

### Example 19

MEVs Loaded with TLR9 Agonists for the Treatment of Inflammatory Bowel Disease (IBD)

[1092] IBD is characterized by an acute or chronic relapsing-remitting inflammation of the gastrointestinal tract. IBD encompasses chronic inflammatory disorders as Crohn's disease (CD) and Ulcerative Colitis (UC), both characterized by a perturbed homeostasis between commensal bacteria and mucosal immunity driving to a mucosal inflammation.

[1093] Toll like receptors (TLRs) control not only innate immunity but also regulate adaptative immunity, such T cell activation, by playing a pleiotropic role in the induction of intestinal inflammation (Corridon D., et al. Front Med (Lausanne) 2018; 16:32. Cario E. Inflamm Bowel Disease 2010; 16:1583-97.) The intracellular TLR9 recognizes unmethylated dinucleotide CpG which acts as an agonist for such a pleiotropic role. TLR9 is expressed in macrophages, dendritic cells and B cells, but also in epithelial cells from intestinal and respiratory track. TLR9 deficient mice develop more severe UC compared to wildtype mice (Lee J., et al. Nat Cell Biol 2006; 1:327-36).

[1094] MEVs loaded with CpG oligonucleotides, such as ONDA or ONDX, appear to be an excellent system to treat IBD, given the ability of MEVs to pass through the stomach and to deliver its payload in the intestinal epithelium and in GALT cells as demonstrated in example 6.

[1095] In mice, the disease can be induced by the treatment with Dextran Sodium Sulfate (DSS) to create a disease model for the evaluation of experimental therapies. Thus, the treatment of mice suffering from DSS-induced acute experimental colitis is a widely used animal model for the evaluation of therapies against the IBD disease. In our case, acute colitis was induced in mice by DSS 3% in drinking water for eight days. Mice were treated with MEVs loaded with agonists of TLR9 (ODNA or ODNX) for 4 days and euthanized on D8 for acute inflammation analysis. All handling of animals was conducted carefully to reduce stress to the minimum. All the experiments were performed in compliance with the guidelines of the French Ministry of Agriculture for experiments with laboratory animals.

### A. Loading of MEVs

[1096] Isolated and purified MEVs were loaded with specific payloads as described in Example 3 using the best method for loading for the specific payload type. For the example, 10χExp12 MEVs were loaded with 10 μg Oligonucleotides (CpG oligonucleotide) agonist of TLR9. The molecules used were ONDA (Invivogen, vaccine grade ODN 1585 a class A CpG oligonucleotide agonist of TLR9) and ONDX (or cobitolimob, class B CpG oligonucleotide agonist of TLR9—synthetized by Eurogentec).

ODNX sequence:
SEQ ID NO: 193
5′-GGAACAGTTCGTCCATGGC-3′
ODNA sequence:
SEQ ID NO: 194
5′-ggGGTCAACGTTGAgggggg-3′ (bases in capital are
phosphodiesters, and those in small case are phosphonothioates..

### B. Experimental Design and Mice Treatment Schedule:

[1097] Animals were randomized before treatment group's allocation based on body weight. The disease was induced by administration of DSS in drinking water (3%, w/v, MW: 40000, TdB Consultancy AB) in C57BL/6 female mice at 9 weeks of age. Mice were administered with test compounds either at D3 and D6 (M1, M3 and M5 intrarectal), or daily from D3 to D6 (M2 and M4, per os). Experimental groups were as follows: seven animals per group; a total of 49 mice.

### Group 1: Normal Mice (Overall Positive Control)

[1098] Mice of this group are not treated with DDS (no DDS in water), and not treated with any test compound.

### Group 2: IBD-Mice (Negative Control)

[1099] Mice of this group are treated with 3% DDS for 7 days in drinking water (3%, w/v, MW: 40000, TdB Consultancy AB), treated with PBS solution. Administration: 100 μL by p.o.

### Group 3: IBD Treated Mice (Treatment Positive Control)

[1100] Mice of this group are treated with 3% DDS for 7 days in drinking water (3%, w/v, MW: 40000, TdB Consultancy AB), treated with ODNX dissolved in sterile water 1 mg/mL solution. Administration 100 μL by intrarectal (i.r.).

### C4. Group 4: MEVs (ONDX-Loaded)

[1101] Mice of this group are treated with 3% DDS for 7 days in drinking water (3%, w/v, MW: 40000, TdB Consultancy AB), treated MEVs loaded-ODNX, 10×Exp12 MEVs/mL solution. Administration 100 μL by p.o.

### C5. Group 5: MEVs (ONDX-Loaded)

[1102] Mice of this group are treated with 3% DDS for 7 days in drinking water (3%, w/v, MW: 40000, TdB Consultancy AB), treated MEVs loaded-ODNX, 10×Exp12 MEVs/mL solution. Administration 100 μL by i.r.

### C6. Group 6: MEVs (ODNA-Loaded)

[1103] Mice of this group are treated with 3% DDS for 7 days in drinking water (3%, w/v, MW: 40000, TdB Consultancy AB), treated MEVs loaded-ODNA, 10×Exp12 MEVs/mL solution. Administration 100 μL by p.o.

### Group 7: IBD Treated Mice (MEVs Treatment Positive Control)

[1104] Mice of this group are treated with 3% DDS for 7 days in drinking water (3%, w/v, MW: 40000, TdB Consultancy AB), treated with ODNA, dissolved in sterile water 1 mg/mL solution. Administration 100 μL by i.r.

[1105] All groups and treatments are summarized in the following table.

TABLE 12
Experimental design and mice treatments

| Group | Mice | Disease | | | Dose and |
|---|---|---|---|---|---|
| # | number | induction | Treatment | Route | frequency |
| 1 | 7 | Water | Untreated | N/A | N/A |
| 2 | 7 | 3% DSS | Vehicle (PBS) | p.o. | 100 μL/mouse, |
| | | | | | daily from |
| | | | | | D 3 to D 7 |
| 3 | 7 | 3% DSS | M1: ODNX | i.r. | 100 μg in 100 |
| | | | | | μl/mouse, |
| | | | | | D 3 and D 6 |
| 4 | 7 | 3% DSS | M2: | p.o. | 100 μl/mouse, |
| | | | MEVs + ODNX | | daily from |
| | | | | | D 3 to D 7 |
| 5 | 7 | 3% DSS | M3: | i.r. | 100 μl/mouse, |
| | | | MEVs + ODNX | | D 3 and D 6 |
| 6 | 7 | 3% DSS | M4: | p.o. | 100 μl/mouse, |
| | | | MEVs + ODNA | | daily from |
| | | | | | D 3 to D 7 |
| 7 | 7 | 3% DSS | M5: ODNA | i.r. | 50 μg in 100 |
| | | | | | μl/mouse, |
| | | | | | D 3 and D 6 |

### C. IBD Analysis

[1106] Mice were euthanized at D8; samples were harvested to determine the extent of intestinal inflammation using various quantitative and semi quantitative methods including body weight evolution, clinical score (Disease Activity index; DAI, Table 13, below), large intestine measurement, cytokine analysis in colon and/or ileum tissue (TNFα, TGFβ, IFNα, IFNγ, IL-6 and IL-17A) and intestinal and colon histopathology for inflammation analysis, as follows and as summarized in Table 14, below.

[1107] In-Life Samples (all groups)
[1108] Bodyweight (daily)
[1109] Disease Activity Index (DAI) (diarrhea and blood in stool)

TABLE 13
Disease Activity Index scoring criteria

| | Description | Score |
|---|---|---|
| Diarrhea | Normal stool | 0 |
| | Light diarrhea | 2 |
| | Severe diarrhea | 4 |
| Blood in stool | No | 0 |
| | Light bleeding | 2 |
| | Severe bleeding | 4 |
| Weight loss | <1% | 0 |
| | 1-5% | 1 |
| | 5-10% | 2 |
| | 10-15% | 3 |
| | >15% | 4 |
| | Final score | /12 |

### Terminal Samples:

[1110] Colon collection (for all groups)
   [1111] Length measurement
   [1112] TNFα, TGFβ, IFNα, IFNγ, IL-6 and IL-17A levels
   [1113] Histological analysis (H&E staining)
[1114] Ileum collection (for all groups)
   [1115] Length measurement
   [1116] TNFα, TGFβ, IFNα, IFNγ, IL-6 and IL-17A levels for groups 1, 2, 4, 6
   [1117] Histological analysis (H&E staining)

TABLE 14
Intestinal Inflammation Analysis Summary

| Organ or | Time- | Sample | |
|---|---|---|---|
| Parameter | Point | Condition | Analysis |
| Body | Daily | N/A | Body weight evolution |
| weight | (all | | |
| | groups) | | |
| Small | D 8 (all | Organ | Total length |
| intestine | groups) | measurement | |
| Small | D 8 | Tissue | Cytokine analysis (TNFα, TGFβ, |
| intestine | (groups | homogenate | IFNα, IFNγ, IL-6 and IL-17A) |
| | 1, 2, 4, | | |
| | 6) | | |
| Small | D 8 (all | FFPE | Histological analysis (HE) |
| intestine | groups) | | |
| Colon | D 8 (all | Organ | Total length |
| | groups) | measurement | |
| Colon | D 8 (all | Tissue | Cytokine analysis (TNFα, TGFβ, |
| | groups) | homogenate | IFNα, IFNγ, IL-6 and IL-17A) |
| Colon | D 8 (all | FFPE* | Histological analysis (HE) |
| | groups) | | |

*FFPE Archived Formalin-Fixed Paraffin-Embedded (FFPE)

### D. Gut Tissue Harvesting

[1118] Ileum and large intestines were harvested and measured before processing. The samples dedicated to histological analysis were embedded in paraffin 48-72 h after formalin fixation (FFPE) and processed for H&E staining, and the samples dedicated to multiplex analysis were snap-frozen for homogenization.

### E. Cytokine Measurement in Ileum/Colon Homogenates

[1119] TNFα, TGFβ, IFNα, IFNγ, IL-6 and IL-17A concentrations in colon and/or ileum homogenates were determined by Multiplex Immunoassay (Luminex Lx200, Millipore) according to the manufacturer's instructions. Results are reported as pg/mL.

F. Ileum and Colon histology

[1120] 1.5-cm piece of ileum and 1-cm piece of colon tissue were fixed in 4% buffered formaldehyde, paraffin embedded, sectioned, and then stained with Hematoxylin and Eosin (H&E) staining. Histopathological changes were individually scored by two independent technicians and validated by a pathologist. Each mouse was scored individually for each of the parameters as a combined score (Table 15), as follows, from Pelin Arda-Pirincci & Guliz Aykol-Celik. Galectin-1 reduces the severity of dextran sulfate sodium (DSS)-induced ulcerative colitis by suppressing

TABLE 15
Histological colitis damage scoring system

| Feature graded | Grade | Description |
|---|---|---|
| Severity of inflammation | 0 | None |
| | 1 | Slight |
| | 2 | Moderate |
| | 3 | Severe |
| Spread of inflammation | 0 | None |
| | 1 | Mucosa |
| | 2 | Mucosa and submucosa |
| | 3 | Transmural |
| Crypt damage | 0 | None |
| | 1 | Basal ⅓ damaged |
| | 2 | Basal ⅔ damaged |
| | 3 | Only surface epithelium intact |
| | 4 | Entire crypt and epithelium lost |
| Percent involvement | 1 | 1-25% |
| | 2 | 26-50% |
| | 3 | 51-75% |
| | 4 | 76-100% |

[1121] inflammatory and oxidative stress response. Bosn J Basic Med Sci. 2020; 20(3):319-328.). The total score is between 0 and 14.

### G. Treatment Results:

### 1. Disease Activity Index (DAI) Results:

[1122] The life samples were recovered every day: i. body weight, ii. diarrhea, and iii. blood in stool and used to determine the disease activity index (DAI). The results are summarized in Table 33, for each animal in each group for seven consecutive days.

### 2. Cytokines Measurements by Multiplex Assay

[1123] Six cytokines were measured after mice euthanasia (D8) in small intestine (ileum) and colon homogenates. No differences between samples were detected either for IL-6, or IL-17, or IFNα, or IFNγ, or TNFα, or TGFβ from colon homogenates of groups 1, 2, 3, 5, and 7. The analysis of samples from ileum (small intestine) showed quantifiable differences of the cytokine's level between samples from groups 1, 2, 4, 6. Table 34 summarizes these results. As the doses evaluated, the treatment with MEVs loaded with ONDA or with ONDX shows the decrease of inflammatory cytokines such as IFNγ, IL-6, IL-17, and TNFα. As far as the levels of non-inflammatory cytokines are concerned, no difference was detected on the level of IFNα, and an increase was shown in the level of TGFβ. In both cases the decrease and increase on the level of inflammatory and non-inflammatory cytokines is higher when mice were treated with MEVs loaded with ONDA as compared to normal animal (without disease induction—positive control)_or IBD mice (with disease induction, and vehicle (PBS as treatment)-negative control).

TABLE 16
ODNA-loaded MEVs improved the disease activity index in the IBD model.

| | Number | Cumulative score (DAI) | | | | | | | |
|---|---|---|---|---|---|---|---|---|---|
| Group | of mice | D 0 | D 1 | D 2 | D 3 | D 4 | D 5 | D 6 | D 7 |
| GR1: | 1 | 0 | 1 | 1 | 1 | 1 | 1 | 1 | 1 |
| normal mice | 2 | 0 | 0 | 1 | 1 | 1 | 1 | 1 | 0 |
| (positive | 3 | 0 | 0 | 0 | 1 | 1 | 1 | 0 | 0 |
| control) | 4 | 0 | 0 | 0 | 0 | 0 | 0 | 0 | 0 |
| | 5 | 0 | 0 | 0 | 0 | 0 | 0 | 0 | 0 |
| | 6 | 0 | 0 | 1 | 1 | 1 | 0 | 0 | 0 |
| | 7 | 0 | 1 | 1 | 1 | 1 | 0 | 1 | 0 |
| | Mean | 0.00 | 0.29 | 0.57 | 0.71 | 0.71 | 0.43 | 0.43 | 0.14 |
| | sem | 0.00 | 0.18 | 0.20 | 0.18 | 0.18 | 0.20 | 0.20 | 0.14 |
| | N | 7 | 7 | 7 | 7 | 7 | 7 | 7 | 7 |
| GR2: DSS + | 8 | 0 | 0 | 0 | 0 | 1 | 2 | 3 | 12 |
| Vehicle (PBS) | 9 | 0 | 0 | 0 | 0 | 0 | 3 | 6 | 6 |
| (D 3 to D 6, | 10 | 0 | 0 | 0 | 0 | 5 | 6 | 4 | 10 |
| p.o.) | 11 | 0 | 0 | 0 | 0 | 2 | 4 | 6 | 4 |
| (negative | 12 | 0 | 0 | 0 | 1 | 1 | 3 | 6 | 7 |
| control) | 13 | 0 | 0 | 0 | 4 | 4 | 6 | 9 | 7 |
| | 14 | 0 | 0 | 0 | 0 | 5 | 6 | 5 | 9 |
| | Mean | 0.00 | 0.00 | 0.00 | 0.71 | 2.57 | 4.29 | 5.57 | 7.86 |
| | sem | 0.00 | 0.00 | 0.00 | 0.57 | 0.78 | 0.64 | 0.72 | 1.01 |
| | N | 7 | 7 | 7 | 7 | 7 | 7 | 7 | 7 |
| GR3: DSS + | 15 | 0 | 0 | 0 | 0 | 5 | 4 | 7 | 10 |
| ODNX | 16 | 0 | 0 | 0 | 0 | 3 | 4 | 6 | 7 |
| (D 3 and D 6, | 17 | 0 | 0 | 0 | 3 | 3 | 5 | 4 | 5 |
| 100 μg/mouse, | 18 | 0 | 0 | 0 | 0 | 0 | 4 | 5 | 6 |
| i.r.) (treatment | 19 | 0 | 0 | 0 | 0 | 0 | 1 | 3 | 6 |
| positive | 20 | 0 | 0 | 1 | 1 | 2 | 5 | 5 | 8 |
| control) | 21 | 0 | 0 | 0 | 0 | 4 | 6 | 10 | 10 |
| | Mean | 0.00 | 0.00 | 0.14 | 0.57 | 2.43 | 4.14 | 5.71 | 7.43 |
| | sem | 0.00 | 0.00 | 0.14 | 0.43 | 0.72 | 0.59 | 0.87 | 0.75 |
| | N | 7 | 7 | 7 | 7 | 7 | 7 | 7 | 7 |
| GR4: DSS + | 22 | 0 | 0 | 0 | 0 | 0 | 3 | 2 | 9 |
| MEVs + ODNX | 23 | 0 | 0 | 0 | 0 | 4 | 6 | 4 | 9 |
| (D 3 to D 6, | 24 | 0 | 0 | 0 | 1 | 2 | 4 | 5 | 7 |
| 1 × 10¹¹/mL, | 25 | 0 | 1 | 2 | 2 | 2 | 6 | 5 | 6 |
| p.o.) | 26 | 0 | 0 | 0 | 0 | 4 | 3 | 4 | 7 |
| | 27 | 0 | 1 | 1 | 1 | 1 | 6 | 6 | 9 |
| | 28 | 0 | 0 | 0 | 0 | 0 | 3 | 6 | 5 |
| | Mean | 0.00 | 0.29 | 0.43 | 0.57 | 1.86 | 4.43 | 4.57 | 7.43 |
| | sem | 0.00 | 0.18 | 0.30 | 0.30 | 0.63 | 0.57 | 0.53 | 0.61 |
| | N | 7 | 7 | 7 | 7 | 7 | 7 | 7 | 7 |
| GR5: DSS + | 29 | 0 | 0 | 1 | 1 | 6 | 5 | 5 | 6 |
| MEVs + ODNX | 30 | 0 | 0 | 1 | 1 | 3 | 5 | 4 | 6 |
| (D 3 to D 6, | 31 | 0 | 0 | 0 | 0 | 5 | 6 | 7 | 8 |
| 1 × 10¹¹/mL, | 32 | 0 | 0 | 1 | 0 | 3 | 4 | 8 | 9 |
| i.r.) | 33 | 0 | 0 | 0 | 0 | 2 | 7 | 5 | 8 |
| | 34 | 0 | 1 | 1 | 0 | 4 | 4 | 8 | |
| | 35 | 0 | 0 | 0 | 0 | 3 | 4 | 5 | 7 |
| | Mean | 0.00 | 0.14 | 0.57 | 0.29 | 3.71 | 5.00 | 6.00 | 7.33 |
| | sem | 0.00 | 0.14 | 0.20 | 0.18 | 0.52 | 0.44 | 0.62 | 0.49 |
| | N | 7 | 7 | 7 | 7 | 7 | 7 | 7 | 6 |
| GR6: DSS + | 36 | 0 | 1 | 1 | 1 | 4 | 2 | 4 | 6 |
| MEVs + ODNA | 37 | 0 | 0 | 0 | 2 | 2 | 6 | 6 | 6 |
| (D 3 to D 6, | 38 | 0 | 0 | 0 | 2 | 2 | 3 | 5 | 5 |
| 1 × 10¹¹/mL, | 39 | 0 | 1 | 0 | 0 | 2 | 5 | 5 | 6 |
| p.o.) | 40 | 0 | 0 | 0 | 0 | 1 | 6 | 5 | 5 |
| | 41 | 0 | 0 | 0 | 0 | 1 | 4 | 5 | 6 |
| | 42 | 0 | 0 | 0 | 1 | 1 | 2 | 4 | 4 |
| | Mean | 0.00 | 0.29 | 0.14 | 0.86 | 1.86 | 4.00 | 4.86 | 5.43 |
| | sem | 0.00 | 0.18 | 0.14 | 0.34 | 0.40 | 0.65 | 0.26 | 0.30 |
| | N | 7 | 7 | 7 | 7 | 7 | 7 | 7 | 7 |
| GR7: DSS + | 43 | 0 | 0 | 0 | 0 | 2 | 2 | 7 | 8 |
| ODNA. | 44 | 0 | 0 | 0 | 0 | 5 | 8 | 7 | 8 |
| (D 3 and D 6, | 45 | 0 | 0 | 0 | 0 | 3 | 4 | 7 | 7 |
| 50 μg/mouse, | 46 | 0 | 1 | 1 | 1 | 1 | 3 | 6 | 6 |
| i.r.) | 47 | 0 | 0 | 0 | 0 | 1 | 4 | 7 | 8 |
| | 48 | 0 | 0 | 0 | 0 | 0 | 3 | 3 | 3 |
| | 49 | 0 | 0 | 0 | 0 | 0 | 5 | 6 | 7 |
| | Mean | 0.00 | 0.14 | 0.14 | 0.14 | 1.71 | 4.14 | 6.14 | 6.71 |
| | sem | 0.00 | 0.14 | 0.14 | 0.14 | 0.68 | 0.74 | 0.55 | 0.68 |
| | N | 7 | 7 | 7 | 7 | 7 | 7 | 7 | 7 |

TABLE 17
Treatment with MEVs loaded with the TLR9 agonist
decreases inflammatory cytokines in IBD model.

| | Number | IFNγ | IFNα | TNFα | IL-6 | IL-17A | TGFβ |
|---|---|---|---|---|---|---|---|
| Group | of mice | (pg/mL) | (pg/mL) | (pg/mL) | (pg/mL) | (pg/mL) | (pg/mL) |
| GR1: | 1 | 3.92 | 17.57 | 22.26 | 33.17 | 19.28 | 88.55 |
| normal | 2 | 6.77 | 19.09 | 19.50 | 77.89 | 17.53 | 50.35 |
| mice | 3 | 4.78 | 19.57 | 32.66 | 43.92 | 15.44 | 9.95 |
| | 4 | 5.74 | 15.04 | 21.85 | 77.25 | 3.71 | 59.19 |
| | 5 | 6.01 | 19.57 | 29.16 | 79.81 | 11.22 | 51.39 |
| | 6 | 6.81 | 28.27 | 33.67 | 167.79 | 37.51 | 16.29 |
| | 7 | 7.67 | 16.48 | 13.29 | 58.95 | 13.33 | 34.67 |
| | Mean | 5.96 | 19.37 | 24.63 | 76.97 | 16.86 | 44.34 |
| | sem | 0.49 | 1.62 | 2.82 | 16.61 | 3.94 | 10.15 |
| | N | 7 | 7 | 7 | 7 | 7 | 7 |
| GR2: DSS + | 8 | 2.96 | 13.80 | 17.06 | 81.72 | 8.92 | 63.66 |
| Vehicle | 9 | 6.95 | 20.97 | 21.58 | 66.89 | 55.49 | 28.52 |
| (PBS) | 10 | 1.93 | 17.57 | 17.64 | 48.09 | 13.51 | 67.07 |
| (D 3 to D 6, | 11 | 2.31 | 23.96 | 13.21 | 181.62 | 62.91 | 9.95 |
| p.o.) | 12 | 8.44 | 26.65 | 26.70 | 46.71 | 9.45 | 49.29 |
| (negative | 13 | 4.65 | 23.75 | 44.64 | 131.40 | 33.41 | 53.43 |
| control) | 14 | 10.26 | 30.48 | 20.13 | 33.17 | 9.81 | 58.26 |
| | Mean | 5.36 | 22.45 | 22.99 | 84.23 | 27.64 | 47.17 |
| | sem | 1.23 | 2.11 | 3.94 | 20.32 | 8.80 | 7.82 |
| | N | 7 | 7 | 7 | 7 | 7 | 7 |
| GR4: DSS + | 22 | 2.66 | 22.72 | 14.17 | 81.72 | 27.92 | 77.29 |
| MEVs + ODNX | 23 | 2.33 | 27.38 | 25.06 | 64.26 | 17.88 | 46.00 |
| (D 3 to D 6, | 24 | 3.53 | 12.45 | 14.56 | 45.32 | 5.52 | 68.72 |
| 1 × 10¹¹/mL, | 25 | 1.20 | 11.34 | 7.52 | 16.92 | 2.24 | 71.93 |
| p.o.) | 26 | 5.61 | 30.15 | 22.39 | 89.93 | 14.04 | 40.03 |
| | 27 | 1.75 | 13.47 | 7.29 | 10.00 | 2.61 | 61.90 |
| | 28 | 5.03 | 19.09 | 13.04 | 44.62 | 4.25 | 40.03 |
| | Mean | 3.16 | 19.51 | 14.86 | 50.40 | 10.64 | 57.99 |
| | sem | 0.62 | 2.84 | 2.56 | 11.49 | 3.67 | 5.95 |
| | N | 7 | 7 | 7 | 7 | 7 | 7 |
| GR6: DSS + | 36 | 1.29 | 10.55 | 4.03 | 1.80 | 5.52 | 116.00 |
| MEVs + ODNA | 37 | 2.23 | 26.28 | 23.80 | 58.95 | 5.16 | 44.86 |
| (D 3 to D 6, | 38 | 2.10 | 19.81 | 10.07 | 39.68 | 15.09 | 49.29 |
| 1 × 10¹¹/mL, | 39 | 3.40 | 27.92 | 25.59 | 60.29 | 4.80 | 47.12 |
| p.o.) | 40 | 1.22 | 12.09 | 1.44 | 6.19 | 2.24 | 189.41 |
| | 41 | 0.66 | 10.55 | 5.05 | 7.17 | 0.74 | 54.42 |
| | 42 | 4.52 | 14.12 | 18.72 | 24.90 | 6.96 | 44.86 |
| | Mean | 2.20 | 17.33 | 12.67 | 28.43 | 5.79 | 77.99 |
| | sem | 0.51 | 2.79 | 3.76 | 9.44 | 1.74 | 20.92 |
| | N | 7 | 7 | 7 | 7 | 7 | 7 |

### H. Conclusion

[1124] Treatment with MIEVs loaded with TLR agonists modulates the level of cytokines in vivo as demonstrated and indicated by the results shown and described herein. Treatment with MEVs loaded with different agonists of TLR9 results in an improved disease activity index (DAI) score in the IBD mice model. Different payloads in the MEVs induced a different degree of improvement or modulation of the immune system, distinctive of each individual payload molecule.

[1125] Oral administration of MEVs for delivery of TLR modulators (agonists or antagonists) provides modulation of the imbalance in in the level of cytokines generated as IBD diseases (ulcerative colitis, and Crohn's disease) progress.

[1126] These results show that the use of MEVs by respiratory administration (nebulization or other), topical administration (eyes, other tissues), intranasal administration (to the CNS) to delivery agonists and antagonists of TLRS provides for modulation of imbalance in the levels of cytokines generated during the progress of inflammatory diseases or states of diseases.

### I. Other Exemplary TLR9 Ligands for Delivery in MEVs for Targeting TLR9 (See Tables 18A and 18B)

TABLE 18A

| Seq | | |
|---|---|---|
| ID NO: | Oligo | Sequence |
| 195 | S3 1 | AGGCGTTTTT |
| 196 | S3 2 | TGGTTTTTTTCGTTTTTTTTTTTT |
| 197 | S3 3 | TCGTTTTTTTCGTTTTTTTTTTTT |
| | S3 4 | TCCCCC |
| | S3 5 | TCGTT |
| 198 | CpG 3 | TGGTTCGTTTTTTT |
| 199 | CpG 4 | TGGTTTCGTTTTTTTTT |
| 200 | CpG 5 | TGGTTTTCGTTTTTTTTT |
| 201 | CpG 6 | TGGTTTTTCGTTTTTTTTTT |
| 202 | CpG 7 | TGGTTTTTTCGTTTTTTTTTTT |
| 203 | CpG 8 | TCGTCGTTTTTT |
| 204 | CpG 9 | TCGTTCGTTTTTTT |
| 205 | CpG 10 | TCGTTTCGTTTTTTTT |
| 206 | CpG 11 | TCGTTTTCGTTTTTTTTT |
| 207 | CpG 12 | TCGTTTTTCGTTTTTTTTTT |
| 208 | CpG 13 | TCGTTTTTTCGTTTTTTTTTTT |
| 209 | 53 | TGGTGGTTTTGTCGTTTTGTGGTT |
| 210 | 57 | TGGTGGTTTTGTGGTTTTGTGGTT |
| 211 | 57-2 | TGGTGGTTTTGTGGTTTTGTGG |
| 212 | 57-4 | TGGTGGTTTTGTGGTTTTGT |
| 213 | 57-6 | TGGTGGTTTTGTGGTTTT |
| 214 | 57-8 | TGGTGGTTTTGTGGTT |
| 215 | 2-57 | GTGGTTTTGTGGTTTTGTGGTT |
| 216 | 4-57 | GGTTTTGTGGTTTTGTGGTT |
| 217 | 6-57 | TTTTGTGGTTTTGTGGTT |
| 218 | 8-57 | TTGTGGTTTTGTGGTT |
| 219 | 57-A | TAATAATTTTATAATTTTATAATT |
| 220 | 57-A1 | TAATGGTTTTGTGGTTTTGTGGTT |
| 221 | 57-A2 | TGGTGGTTTTGTGGTTTTGTAATT |
| 222 | 57-A3 | TGGTGGTTTTGTAATTTTGTGGTT |
| 223 | 57-8A | TAATAATTTTATAATT |
| 224 | 57-8A1 | TAATGGTTTTGTGGTT |
| 225 | 57-8A2 | TGGTGGTTTTGTAATT |
| 226 | 57-8A3 | TGGTAATTTTGTGGTT |
| 227 | CpG-B | TCGTCGTTTTGTCGTTTTGTCGTT |
| 228 | CpG-C | TCGTCGTTTTCGGCGCGCGCCG |
| 229 | CpG 8(PO) | tcgtcgtttttt |
| 230 | 57(PO) | tggtggttttgtggttttgtggtt |

TABLE 18B

| SEQ | | |
|---|---|---|
| ID NO: | Oligo | Sequence |
| 231 | 18 | CTCTTGATTTCTCAGC |
| 232 | 95 | GACATAGTTAATTGCC |
| 233 | 5 | TCTCATTTATTTCGGC |
| 234 | 549148 | GGCTACTACGCCGTCA |
| 235 | 549139 | AGCGCGCCTGAAGGTT |
| 236 | 465131 | TGCCACCGTAGACACG |
| 237 | 469117 | GTCTGTGCATCTCTCC |
| 238 | 508031 | TGAGGTCCTGCACTGG |
| 239 | 482050 | ATCATGGCTGCAGCTT |
| 240 | 18(2PO) | CtcTTGATTTGTCagC |
| 241 | 05(2PO) | GacATAGTTAATTgcC |
| 242 | 95(2PO) | TctCATTTATTTCggC |
| 243 | H154 | CCTCAAGCTTGAGGGG |
| 244 | 1502 | GAGCAAGCTGGACCTTCCAT |
| 245 | 4000 | TTAGGGTTAGGGTTAGGG |
| 246 | G-ODN | CTCCTATTGGGGGTTTCCTAT |
| 247 | IRS954 | TGCTCCTGGAGGGGTTGT |
| 248 | IRS869 | TCCTGGAGGGGTTGT |
| 249 | INH | CCTGGATGGGAACTTACCGCTGCA |
| 250 | 2114R | TGAAGGGGAGGTCCT |
| 251 | 4352 | TCCTTCCTGGAGGGGAAG |
| 252 | 4191 | TCCTATCCTGGAGGGGAAG |
| 253 | 4351 | (TCCTA)2TCCTGGAGGGGAAG |
| 254 | 4348 | TCGTATCCTGGAGGGGAAG |
| 255 | 4348 | TAATATCCTGGAGGGGAAG |
| 256 | 4347 | CCTATCCTGGAGGGGAAG |
| 257 | 4350 | TCCTATAATGGAGGGGAAG |
| 258 | ODN | TGGGGGACGATCGTCGGGGGG |
| | 2216 | |

Uppercase indicates phosphonothioates (PS) bonds.
Lowercase indicates phosphodiester (PO) bonds.
2′cET modifications are in bold.

[1127] Since modifications will be apparent to those of skill in the art, it is intended that the invention(s) only are limited by the scope of the appended claims.

What is claimed:

1. A microalgae extracellular vesicle (MEV), comprising cargo selected from:
a) an agonist or an antagonist of a Toll-like receptor (TLR) and/or nucleic acid that is or that encodes a TLR agonist or a TLR antagonist; and/or
b) a modulator of an intracellular receptor involved in an immune response, whereby modulation of the TLR or intracellular receptor triggers a downstream signaling pathway mediating regulation of immune mediators; and/or
c) an antigen or immunogen and/or an immunomodulator, or nucleic acid encoding the antigen, immunogen, and/or immunomodulator, wherein the immunomodulator is an agent that acts on the immune system directly or indirectly,
wherein the microalgae is a species of the family Chlorellaceae.

2. The microalgae extracellular vesicle (MEV) of claim 1, wherein:
the cargo comprises a ligand that interacts with an endosomal receptor in an endosomal vesicle, whereby the cargo binds to the receptor and effects a biological response from within the cell;
the receptor is a toll-like receptor; and
the cargo comprises an agonist or an antagonist of a toll-like receptor (TLR) and/or comprises nucleic acid that is or that encodes a TLR agonist or a TLR antagonist, whereby modulation of the TLR receptor triggers a downstream signaling pathway mediating regulation of immune mediators.

3. A composition, comprising an MEV of claim 1, wherein the composition is formulated for administration by a route whereby the MEVs traffic to a cell, tissue, or organ of the immune system.

4. A vaccine composition, comprising a microalgae extracellular vesicle (MEV) of claim 1, wherein the composition does not comprise an exogenous adjuvant.

5. A vaccine composition, comprising a microalgae extracellular vesicle (MEV), of claim 1, wherein:
the vaccine is for treating, preventing, or reducing the severity of a disease, disorder, or condition; the immunomodulator is an agent that acts on the immune system directly or indirectly;
the composition is formulated for administration by a route whereby the MEVs traffic to a cell, tissue, or organ of the immune system; and
the composition does not comprise an exogenous adjuvant;
the vaccine is for treating, preventing, or reducing the severity of a disease, disorder, or condition;
the cargo comprises an agent that acts on the immune system directly or indirectly;
the composition is formulated for administration by a route whereby the MEVs traffic to a cell, tissue, or organ of the immune system; and
the composition does not comprise an exogenous adjuvant.

6. A composition of claim 3, comprising a nucleic acid molecule of any of SEQ ID Nos. 193-228.

7. The composition of claim 3, wherein:
the cargo comprises an agonist or antagonist of a TLR or nucleic acid encoding an agonist or antagonist of a TLR; and
the TLR is TLR9 or TLR3.

8. A vaccine composition, comprising a microalgae extracellular vesicle (MEV), wherein:
the microalgae is a species of the family Chlorellaceae;
the MEV comprise cargo that comprises one or more of antigen, immunogen, and/or an immunomodulator, or comprises nucleic acid encoding the antigen, immunogen, and/or immunomodulator;
the vaccine composition is for treating, preventing, or reducing the severity of a disease, disorder, or condition;
the immunomodulator is an agent that acts on the immune system directly or indirectly;
the composition is formulated for administration by a route whereby the MEVs traffic to a cell, tissue, or organ of the immune system.

9. The vaccine composition of claim 8, wherein the composition does not comprise an exogenous adjuvant.

10. The vaccine composition of claim 8, wherein the antigen comprises an antigen from a pathogen or from a tumor or cancer.

11. The vaccine composition of claim 8, wherein the immunomodulator is a cytokine or chemokine or receptor agonist or antagonist, or a receptor, or ligand that modulate an immune response.

12. The vaccine composition of claim 10, wherein the antigen from a pathogen and the pathogen is a bacterium, a virus, a parasite, or a fungal pathogen.

13. The vaccine composition of claim 8, wherein cargo in the MEVs comprises an antigen or nucleic acid encoding an antigen or an immunogenic protein, polypeptide, peptide from a pathogen.

14. The vaccine composition of claim 12, wherein the pathogen is a bacterial pathogen or a virus.

15. The vaccine composition of claim 14, wherein the pathogen is selected from one or more of: Enterobacterales, Vibrionales, Legionellales, Pseudomonadales, Pasteurellales, Staphylococcus, Streptococcus, Bacillus, Listeria, and Nocardia.

16. The vaccine composition of claim 15, wherein the pathogen is selected from one or more Shigella, Salmonella, Escherichia coli, Vibrio cholerae, Legionella neumophila, Pseudomonas aeruginosa, P syringae, P gingivalis, Acimetobacter, Moraxella, Haemophilus influenzae, Mannheimia, Actinobacillus, Staphylococcus aureus, Streptococcus pneumonia, Listeria Clostridium, and Nocardia species.

17. The vaccine composition of claim 15, wherein the pathogen is virus that is a hepatitis viruses, herpesviruses, varicella zoster virus (VZV), Epstein-Barr virus (EBV), human immunodeficiency virus (HIV), human T-cell leukemia virus (HTLV), Respiratory Syncytial Virus (RSV), measles virus, influenza virus, and coronaviruses.

18. The vaccine composition of claim 17, wherein the coronavirus is selected from among Severe Acute Respiratory Syndrome coronavirus (SARS-CoV), Middle East Respiratory Syndrome coronavirus (MERS-CoV), and Severe Acute Respiratory Syndrome coronavirus 2 (SARS-CoV-2), and Rhinovirus.

19. The vaccine composition of claim 8, wherein the cargo in the MEVs comprises a bacterial or viral antigen or nucleic acid encoding the antigen or an immunogenic portion thereof or epitope thereof selected from one or more of:
heat-labile enterotoxin B subunit of Escherichia coli;
Cholera toxin B (CTB) subunit of Vibrio cholerae extracellular capsule protein F1/immune-modulator V fusion protein of Yersinia pestis;
Outer membrane protein receptor for ferrichrome of Shigella flexneri;
Outer membrane protein OprF of Pseudomonas aeruginosa;
N-terminal portion of the Candida albicans agglutinin-like protein 3 (Als3p) of Staphylococcus aureus;
27-kDa outer membrane protein (T2544) of Salmonella enterica serovar Typhi;
Hepatitis B surface antigen (HBsAg) of Hepatitis B virus (HBV);
E1-E2 genome polyprotein of Hepatitis C virus (HCV) genotype 1a;
Inner capsid protein VP6 of Human rotavirus A;
Outer capsid glycoprotein VP of Rotavirus A;
Capsid protein of Norwalk virus (NV);
spike protein Si fragment of SARS-coronavirus (CoV);
B5R antigenic ectodomain of vaccinia virus;
envelope protein (E) of Japanese encephalitis virus (JEV);
VP4N20 antigenic peptide of Coxsackievirus 16 (CV-A16);
VP4N20 antigenic peptide of Enterovirus 71 (EV71);
Minor capsid protein L of Human papillomavirus type 16 (HPV-16);
Envelope glycoprotein D of Human herpesvirus 1 (HHV-1);
envelope domain III protein of Zika virus;
Major surface glycoprotein G of Human respiratory syncytial virus A (RSV strain A2);
domain III fragment of dengue 2 envelope protein (D2EIII) of Dengue virus type 2;
Merozoite surface protein 4 (MSP4) of Plasmodium falciparum;
Merozoite surface protein 5 (MSP5) od Plasmodium falciparum;
Trans-sialidase Trypanosoma cruzi A2 protein of Leishmania infantum; and
N-terminal portion of the Candida albicans agglutinin-like protein 3 (Als3p) of Candida albicans.

20. The vaccine composition of claim 19, wherein the sequence of the antigen is set forth in any of SEQ ID Nos:160-186 or is an immunogenic, antigenic, or epitope portion thereof.

21. A composition, comprising an MEV of claim 1, wherein the cargo comprises an immune modulator or nucleic acid encoding the immune modulator selected from among one or more of a cytokine, chemokine, co-stimulatory molecule, TNF superfamily of ligands or receptors, Toll-like receptor (TLR) agonist or antagonist, or immune checkpoint inhibitor, or a type I interferon or interferon-γ.

22. The composition of claim 21, wherein the immune modulator is an antibody or antigen-binding fragment thereof that specifically binds to and inhibits one or more of CTLA-4, PD-1, PD-L1, PD-L2, the PD-1/PDL1 pathway, the PD-1/PDL2 pathway, HER2, EGFR, TIM-3, LAG-3, BTLA-4, HHLA-2, CD28, and other checkpoints or immune suppressors, or tumor antigens.

23. The composition of claim 3, wherein the composition is formulated for oral administration, intramuscular administration, inhalation into the lungs or nose, mucosal administration, or local administration, or subcutaneous administration.

24. A composition comprising the MEV of claim 1, wherein the cargo comprises mRNA or DNA encoding the antigen or portion thereof, or the immunomodulator.

25. A composition, comprising an MEV of claim 1, wherein the MEV cargo comprises a TLR antagonist or agonist, and/or nucleic acid encoding a TLR agonist or antagonist.

26. The composition of claim 25, wherein the TLR antagonist or agonist is one or more of dsRNA (polyadenylic-polyuridilyc acid (poly(A:U)); polyino-sinic:polycytidylic acid (Poly (I:C) High Molecular (HMW) or Poly(I:C) Low Molecular Weight ((LMW); an antivirals shat is R848, R837, CL075, or CL264); taxol; flagellin; the flagellin-mimetic peptide flp22; unmethylated CpG motif oligo-nucleotides, CpG oligodeoxynucleotide(ODN) of class A, class B, and/or class C, dsRNA polyadenylic-polyuridilyc acid (poly(A:U); polyinosinic:polycytidylic acid (Poly (I:C)), taxol; flagellin; flagellin-mimetic peptide flp22, antivirals R848, R837, CL075, and/or CL264).

27. The vaccine of claim 25, wherein:
a) the TLR and TLR agonist is selected from one or more of:
TLR1 and the agonist is a triacyl lipopeptide Pam3CSK4;
TLR2 and that agonist Zymosan, Porin, Modulin, Lipoproteins, Lipoteichoic acid, Diacyl lipopeptides, Atypical LPS, Peptidoglycan, Triacyl lipopeptides
TLR3 and an agonist that is a dsRNA;
TLR4 and an that is Mannan, Taxol, and/or lipopolysaccharide (LPS);
TLR5 ant the agonis it a bacterial flagellin, profilin, HMGB1, and/or a Small molecule agonist CBLB502;
TLR6 and the agonist is Zymosan, Porin, Modulin, Lipoproteins, Lipoteichoic acid, Diacyl lipopeptides (Pam2CSK4), Atypical LPS, and/or a peptidoglycan;
TLR7 and the agonist is imidazoquinoline, loxoribine, a ssRNA, bropirimine, and/or resiquimod;
TLR8 and the agonist is a ssRNA, and/or a small synthetic compound;
TLR9 and the agonist is CpG DNA;
TLR10 and the agonist is a diacyl and/or triacyl lipopeptide; and
TLR11 and the agonist is a profilin-like protein, or a non-pathogenic bacterium; and/or
b) the TLR and antagonist is selected from one or more of:
TLR1 and the antagonist is CU-T12-9 and/or MMG-11;
TLR2 and the antagonist is AT1-AT8, CU-CPT22, CU-T12-9, MMG-11, NPT1220-312, Phloretin, and/or a sulfoglycolipid;
TLR3 and the antagonist is CU-CPT4a, monoclonal antibody NT04685, and/or monoclonal antibody CNT05429;
TLR4 and the antagonist is Norbinaltorphimine, T4Ics, T5342126, and/or Simvastatin;
TLR5 and the antagonist is TH1020;
TLR6 and the antagonist is Simvastatin;
TLR7 and the antagonist is chloroquine, hydroxychloroquine, and/or quinacrine;
TLR8 and the antagonist is CU-CPT8m, and/or CU-CPT9a; and
TLR9 and the antagonist is NPT1220-312, chloroquine, hydroxychloroquine, quinacrine; and/or suppressive or inhibitory oligonucleotides.

28. The composition of claim 3, wherein the cargo comprises an immunomodulator that suppresses the inflammatory response.

29. The composition of claim 3, wherein the cargo comprises an immunomodulator that suppresses an inflammatory response but does not suppress and anti-cancer immune response.

30. The composition of claim 3, wherein the MEVs are formulated for oral administration and the disease, disorder, or condition involves the gastrointestinal tract or the immune system or the white spleen.

31. The composition of claim 3, wherein the microalgae is a species of Chlorella selected from among Chlorella ellipsoidea, Chlorella pyrenoidosa, Chlorella sorokiniana, Chlorella vulgaris, and Chlorella variabilis.

32. The MEV of claim 28, wherein the Chlorella is Chlorella vulgaris.

33. A method of treatment, prevention, or reduction of the severity of a disease, disorder, or condition, comprising administering a vaccine composition comprising the MEV of claim 1 to a subject.

34. A method of treatment, prevention, or reduction of the severity of an enteric disease, disorder, or condition, comprising administering a vaccine composition comprising the MEV of claim 13 to a subject.

35. The method of claim 33, wherein the vaccine composition is administered orally or intramuscularly.

36. The method of claim 33, wherein the composition does not comprise an exogenous adjuvant.

37. The method of claim 33, wherein the vaccine is administered a plurality of times.

38. The method of claim 33, wherein the vaccine elicits a protective humoral response that comprises serum IgG and IgA and/or mucosal IgG and IgA.

39. The method of claim 33, wherein the vaccine composition is formulated for oral administration and the disease, disorder, or condition is a disease, disorder, or condition involving a pathogen or is cancer or an immune system disorder.

40. The method of claim 33, wherein the disease, disorder, or condition is one more of cancer; an autoimmune disease; an inflammatory disease, disorder or condition, or a disease, disorder, or condition in which inflammation plays a role in the etiology of the disease, disorder, or condition.

The application's sequence listing, which the Patent Office published only in electronic form, follows.

SEQUENCE LISTING (353 sequences)

SEQ ID NO: 1 - protein, 459 aa, Homo sapiens
  REGION 1..459: note = Peptidyl-prolyl cis-trans isomerase FKBP4 (full sequence)
MTAEEMKATESGAQSAPLPMEGVDISPKQDEGVLKVIKREGTGTEMPMIGDRVFVHYTGWLLDGTKFDSSLDRKDKFSFDLGKGEVIKAWDIAIATMKVGEVCHITCKPEYAYGSAGSPPKIPPNATLVFEVELFEFKGEDLTEEEDGGIIRRIQTRGEGYAKPNEGAIVEVALEGYYKDKLFDQRELRFEIGEGENLDLPYGLERAIQRMEKGEHSIVYLKPSYAFGSVGKEKFQIPPNAELKYELHLKSFEKAKESWEMNSEEKLEQSTIVKERGTVYFKEGKYKQALLQYKKIVSWLEYESSFSNEEAQKAQALRLASHLNLAMCHLKLQAFSAAIESCNKALELDSNNEKGLFRRGEAHLAVNDFELARADFQKVLQLYPNNKAAKTQLAVCQQRIRRQLAREKKLYANMFERLAEEENKAKAEASSGDHPTDTEMKEEQKSNTAGSQSQVETEA

SEQ ID NO: 2 - protein, 140 aa, Homo sapiens
  REGION 1..140: note = Peptidyl-prolyl cis-trans isomerase FKBP4tetratricopeptide repeat (TPR) domain 260-400
MNSEEKLEQSTIVKERGTVYFKEGKYKQALLQYKKIVSWLEYESSFSNEEAQKAQALRLASHLNLAMCHLKLQAFSAAIESCNKALELDSNNEKGLFRRGEAHLAVNDFELARADFQKVLQLYPNNKAAKTQLAVCQQRI

SEQ ID NO: 3 - DNA, 30954 bp, Homo sapiens
  misc_feature 1..30954: note = Gamma-aminobutyric acid type B receptor subunit 1
  source 1..30954: mol_type = genomic DNA
ctctcttccccccgccctgccttcccttgcaccctccttcttccctccgcccgggagctctccctggtccccggcgccgcctccttccctcccggctccccgctccccgctcccgtggctgccgccgccccggggaagaagagacaggggtggggtttgggggaagcgagagaggaggggagagaccctggccaggctggagcctggattcgaggggaggagggacgggaggaggagaaaggtggaggagaagggaggggggagcggggaggagcggccgggcctggggccttgaggcccggggagagccggggagccgggcccgcgcgccgaggtaagagccagggccccgggttagcagggctcggagagggggcgcgcggcgtggtgggggagggggcagtgggcgcagggcccagctgggggaagcggggctgggggagaggaggaaccgcggggatggaatcggggagcgctgaggcggccgatgccgggagcgtgggtaagccaggcttctgcgagccgcgggggccgggggagaggaggtggtgagaggtggagtcccgggagggttgggggccgagggaggcaggaggagggtggggacaggctttctctcctcctctccccccaccccgcgcggggctccgcccccgcctcctccgcggggcgctctcttggtccccaggctgagcccggtcggagcctgcgaggcaaccggcaagaggtcgagtagtctccgggtgcgggccgcgccggcggggctcggtccagtcctcatggccgcctctcacttagatgttgctgctgctgctactggcgccactcttcctccgccccccgggcgcgggcggggcgcagacccccaacgccacctcagaaggtgcatccttcttcgacgacctccggccctccttcgctccacttccctttccctgcatctcctcatttctggtcctcatcactatcccatcagtcccacatatcatcccggtctggcaaccccttctgctcggcccgactttactactgctgacctccttctgtcaccccacgttactatccagcacctcttttctctgcccacattgctacactataccaccttcctgtgcattttctccgcctcaatcccctttcccagccccacattactacctcaattactcccttttcttggtcccactttgctgtccagatgatcttattagcctccctttatcctcctatcctaattcaactcgaatatcctcatttagcctttttttttaaagaaaagctccacccacatatcatacccttcatgatttcttaattacttttctttcttacctccacccagcacccttccctccccacttgtgggttctctcatcagctttaaccctggccctttactctctgtcctttagccaggggatctgtacctgtccccactcccaccctctagtgccccatccctcttcctctgtccccagcctgcccacagaccacgccctactctccccttcctcccactggggagcctgccttttcctctttcccaccattcctctctgtatgcctccccgactcaccccttaggttgccagatcatacacccgccctgggaagggggcatcaggtaccggggcctgactcgggaccaggtgaaggctatcaacttcctgccagtggactatgagattgagtatgtgtgccggggggagcgcgaggtggtggggcccaaggtccgcaagtgcctggccaacggctcctggacagatatggacacacccagccgctgtggtgagtagcctcggaagcccctcccctcttcaagactattccttttcctgccgcaaacttagcattactgcttgcaagtcagcactttaaatccagtataccaaaattcacaaatacatttattgaatgactactacataagagcaattttgctctgtgcggttggaggtagtagagctagcagcctgcacagttcatttcatcctcccttcattaggccactgatcattggcctataacattgataattcatcttgtcagttattctctttgaggatcattagtggcagatgatgacaaaaaaattctaaaatgatttcatcacatttttgaatacctctgtcaccaacccagagaccatatgcccaagaaacaaaagccagtttaatattaatagaagccaactataataagaaaagcaaatctgattgtgcatccaaagttatatacatctacatatttcaaagccagagaaccgcccactgtagctgactttgaagagatcccattttgtgtgcttatagccccatcttgggttcctaaaatggtaattttttttttcttttgggaatgtgtggatgcttgcacaggtaagggaggattggaagataggtaggcaaatccttttcacatgtgattttctttagagcaggatgcttgtggacccaaacctgcacctgagtcccctgctctttaaagggaaagagccttcttcaactcgcctctcttcttattttcctatctctccacagtccgaatctgctccaagtcttatttgaccctggaaaatgggaaggttttcctgacgggtggggacctcccagctctggacggagcccgggtggatttccggtgtgaccccgacttccatctggtgggcagctcccggagcatctgtagtcagggccagtggagcacccccaagccccactgccagggtgaggggaacagctgcctgcatgcagctgatgaggacgcttgtgtgaggatgggagtggggtgggaatggataatgggaaagaatggagagctataaaaatgtgggggaggacactggaaaggggagatgaaagtccctttttcctccatcacctgcctcaaacttcctcttgcagtccccggtatcctctgtaggttgggggcttccttcctttaccttttaaaaaaatcttcctgctcccgattcttagacctcacgttttctcttttcctttatgaatctcacctctctcaccttcttcaggtttaaatactccaattttccctttctctaaacttagaaatttccatgcatcaccctcttctagaattcatccctcaccattccttatataattgatttattgtaaagactcagaaataaatcaaacattctactaagaaaaattgagaaggggagctctgggggtggaaacatattagggtaaaagacttaaaattggaggcagcattatcagaagatgaagaacaactcagggatggggtgggaagaagacaggtccttttctgtacttcctagacaacctccattattccctaagggaatcagtgttgtgtctgtctacttttttttttttttttttgccacgtaattttacaaactctcccttttctaggcacccgaactctctgccatcttctctcctgggatgcagtcatcccatttgtatgcctcatacttcctctaccctggtagattctttcaagatccttgggctttactttcctcacataactcagttattctgcttctagtttaccattttattctggaaattgagagtcccatccaggggtggacttatgacactactgaaacttagacttcaaggttcctcacctacagggccctcttcctgtgctctaataatatagagggctcgatggatatgtgttcatatggtaacaggcttttgtaaaaattgcagaaataagattttaacagcaattgcttaaagccaattgtatgtgtaattttttttcttaaagactcccaattttgtaatattcaggcaccacagaaccaagatctgccccaaacttagctattggcattcccgtctcaaattctgttgtcctatgaaaaatcgaagaagaaaataagtcctgacccccttacccccagacccaccttgttcttatccccaggcaccctcccctcagaaacgcaggcttctgctctccccggtcttcagcatggacaggtgtgggagggggctggggatcaggccagggaagctgggcgccagtggtaactcttctctgatccccgtctttcctgctgccagtgaatcgaacgccacactcaggtgagatgagaaacccttaccgcgcgcactgcaatgccctccccttcactctgcaccctccacccccctgaaattctgcccttaggctacggggcgtcgtcctttcgcaccttccccaacccaccccagtttgcggccacccccttccctccctacctgtttcctgcctccagtcccggttttccacgaggctgcggtctctccttgtccctgcttggctacacttccctgggctccacctcctcccagactgagcctcgccggtgtcaggcagagcccagcagagggcggcagggtgctgggagaccctgagctcccaccacgttttcccctgtggggttccttgcgaccttcgctggaaccttttccagcctgctgcctcctaggatttcacctaatggactttctcagcctgtcccacccatcccaaccctggccaggcctctcgcgctcttccccacatcttttccttccgtgtaccccttccctcgtcttttctcaattccatgtcctgtctccctttcttaggcttctgtctacccagccccaggctcccttccacgaccccaccactccctcaaaccagcctcccttccgtacccaactcgttccctccaaaaccgtttcctctcccccacatcctcagtgcttcactgtatcgactcatactcccacttcagacctcaggcgccagccccgtttctctcccgtcccactcgcatccttcccttcctaccctggttcctccgtgcttcagcctcccgcggctccctccgcccaccccgccctcctggcacgccccgtccccatttctcctcccctcgggtccccttaagtgagatccctcccttcctctttcgttcctttcctcctcgaggttgcatcccccctcccctccccgcccctccgactgtcgctcccacctcggcgctcgcttccctccccgcccccttcctgcctccccagctcccgcccgcccccccaccccccgctgccgcgcgccgcccgtgacgtcagagccccctcccagccccacatctccctcctgctcctcctcctcccctccgtcggtcagtcagtccgcgaggagagtccgcggtggcggcgacggtggcgagagccgcgggggccgtaggaagccaaccttccctgcttctccggggccctcgccccctcctccccacaaaatcagggatggaggcgcctccccggcaccctcttagcagccctccccaggaaaagtgtcccccctgagctcctaacgctccccaacagctacccctgccccccacgccatggggcccggggccccttttgcccgggtggggtggccactgccgcttctggttgtgatggcggcaggggtggctccggtgtgggcctcccactccccccatctcccgcggcctcactcgcgggtccccccgcacccctcctcagaacggcgcgcagtgtacatcggggcactgtttcccatgagcgggggctggccagggggccaggcctgccagcccgcggtggagatggcgctggaggacgtgaatagccgcagggacatcctgccggactatgagctcaagctcatccaccacgacagcaaggtagccctggacatgggggtgggtgggaggtgggggcttgcggggcagggggccagccagctgcacgcgcccccatctgtctgagtcgtctctgggattgcgaggcagacccctcccttgtgtgactggcaggagatgggctgggggtgcaggagcttggggagagtcgcaggggctggaggtccaagatgagggtctaggggctcaagatggttaagcatgctgcaaggcagacccttctgccccgctgcgggagtctcgcagaagtgtcggggtttggagaaactggtggtggatttaaggtattaggagacactgatcctctgagggagtaaactaaccctggaatgggttgggggtggagggaatgtcagaggtggggagctggattgggggtttacatttaccatggtaacaaggtaaaatcttggcgtaggttggagctggaaggaatagggacagaatgaggaaaattttgagagacttgagagctctagtttatttatcttaacaaaacagcaaggtagtggtgagccctacctgactccttctcatccttctattcccaaccctgttgagcattcccagactgtgggatagatggcatatggtgattggggaaggctaatgatcaagaggtgggcagaggcactgggaaaatgaattggattggggatccacatgggaacccccacaatagcatggggatgaagaagagtcaacatacaaggagaagagaacagaaaagaatggcagtgggggagaggggcaaggaggtagcgtggggataatgagagatcttggggcaccttatggaacttgggtcctgaccttcccttcccttatagcattgtggcctctaggatgtgagaagggaaatgggatgtagggattagggaggtgagttgagggagagagagaaggtaagcaaatttgggtccaggggtattaggggatagcttataatgaggttttttttcccacccctctcccctacatgaataattgggggtgcagggaaggatgtgacacagggaaggagatttaagatctcaaatttatcttcactgacatgtggccccagagacttaaggaattgggttagggtgaaatagagtacacaaggtgagaatttggtgatcttaccaaatatcaaccttggggtgatccaaggatttatattcatttttagaacatcactatacacctagaaataggtgtgtgtctgggataggtgtgtgaggggacagaagtgaggttgaaggtagggtgcttgaagagaagagagcacaaggattatcaggagcttggcaagagaacttaaaatcctttttgactgttactttctcgtggttctcagccttcagtgtacataagaatcaccagaggagtttgttaaaaatacagattctagctccttggtcagggatgaatcccaagtatttatctgtatttttactaatagacatcctatcttggtggattcctgagctgtaagctaaccccagaatgcctatgggaagagcagcagggtacaggaaaataattaggtattagggtacgggaggcaggaagagaagtagaggatcagatctggtagagggtcagacttgggacagtcagagagatcattggttttggggagtggagtgtgaagaaaatgacagggagagatgggtgcaggctttatgataggggatcacaggagataggggaggcctggctgtgagctcaaactcatccaccatgacaggtgattccctggaggtggcggggagcagacgtgggacctgggagaagggaactggagaacatcagaggcatcaagcggggtgggatgggaaggcagaagaaccagaatgtgtcaattggaatgagtcggtttcctgcctgcaaatccagatccttgcaagagcaaagagagggaggagaactaaggaaatctattggggagggggagagaatcacgtggtggagagaatctgcagtgatgaatagtgtgtggaagagggaaacggttgcaagaaaaggtagataagaaatcaggaaacaaaatggggggcatgccttgccctgttgatatgtatcttatatgttcttgtatgtcctcattgttcctattaaccctgtctttagagaagtggaggggcactgaggggctgtgggagaagctgggagcaggatctggagtaatagatgtggggagagtgcaggaaggtgggtcctgagaatggtaaagatttacaaagttgccctagtgggaggcataaagagaaaaccttccaatgttgttgagcactgcccttggccagagtgagggtagggtgggcaacagagaattctcagtgactgctggttcttcagattccaacagcttcccctggctcccccttctccaacttcccaccgtgtcccaaatgtcaggcctcagtgggaggtaagcaggctccagagtgctttctttatttcctttctacttatcctcccctcctggcaacatttcaccctccttagtcccctgagccccctgtctgtgtcccctctgccctggctccccactggctgccatttcgtcttcacatgcattggggttccagcagcttctgaaatgtcatatatcagtgggaggggaacaggcagtgggagacccaaggctggctcttcctcccccatttcccctcctcccaagcttcctttcttctccagctttctgcttgtttactttccctagctccaagcctctctttaaggcacctctcaaattgtctggtttcttgagagttccattctattcattctctctgttctttcctcatcctacattcttccctacttccaccccccagtgtctttttttctaatggacctgtcaaatgtcagcgcccagcaggagggatggatcactgagcgggaccccctactggtcttgttcctgttctctctttacttatcactagctctgaaaagagaagagggaggaaacaaatggaaggtggggagaaggggtttgcagaggtgaggaaggaattttcataatatggctttgagcaagctatctggggatgtggaaagagtttaccgtattcctactgacttcttccacccactggtgtttgaagcatagaaacatggggtaaagggcttggtgacagagggaagggggatgtctgagggtgagctgaaaggaggtaaggtggtatgttcattaataccaaaggaggggtgtgcaggagaggtgatgggtaaggctccagatggaagacagagaaggaagtttaatgaaagaggagaaaaaaggcacttgacaggaagagatgccagaaaggagaagaaaacggtaattaatgatgaaagtgagtaattgagaaaggaactaatttgttcgagaaagataagagcaggaattgcagacaggggaggggccccaggagagcttgccctcatctcctcttgtctttcagtgtgatccaggccaagccaccaagtacctatatgagctgctctacaacgaccctatcaagatcatccttatgcctggctgcagctctgtctccacgctggtggctgaggctgctaggatgtggaacctcattgtggtaagcagggctatgggggtcagaagatggggtcattcccttttgagctctactgaagggacgatggcgattgtgggtttgtattgaaaaggagtgtggaggacctgctactaagattcagagtcctctgcagacctgagctaggcagcctcctagcaacagtggcctgacagtgctgcagctgacctccttcttcagaaggaattgaaattagatcagtgaaagagcatcccggttgtgaggggtgtgtgggcctttgagaatctcttttccttaggcagaccagaggtggggaggtttggagagagtaaggaagagaaacccaaaggcaggaagagggttaaaggaactcttggccactcttggtgtcctcagtgaacagaccctgttgcactcactctccctgccccacagctttcctatggctccagctcaccagccctgtcaaaccggcagcgtttccccactttcttccgaacgcacccatcagccacactccacaaccctacccgcgtgaaactctttgaaaagtggggctggaagaagattgctaccatccagcagaccactgaggtcttcacttcggtgaggaggggttgggcaaggggtaaagggacataagctcaaattccagcaccaggagatgtgacgtgagagtcacttttaggggcaagaacttgattcttcattgaaagagaacgcattccatgtggattaagtgcagttctttctgtagccaggggaaagaatgagttgagtttttgggatcctctctgtctttatgattttatgatttttttcccctgtttgatgccctgttccccagacatatagacccagaatgactcagttctgttaaagtaggttcaatccaaagtgggggcaagagatgggagcgaagatgagataggaatccaggaaggcagcagattccagaggctttcaaggggggtggtgggtgggtgtgaatgggaacagaggggatggagccagtggattacagaggagagagggagaggaaagagagagagagagaggaatgagggagaggagagagaggggcagaaaggcagctgcatggatctggtagttggtactaagagagagaagccgacagacaaggagaggttgagggggaagagggagatttggggaggtagagaggaaatacaggctctacatctgaagaaggcagtctgctccctcccttttattctattctttgggtcttctatccactgtgttcagtggccctttaatcctcccccactttcactctgattcagaccattcttctctgatcctttgtctgtctgcccatttgcctcttgaggttgacatcatgctgtctgtcccagtccttgccttgtcttttcctggttcctttatgtttctttaccccatctttgccttcagtggtaggagtgggtgaatggagtggcttcccccacacagagcctcagcaggggctcaccattcaccttcccacttggaatccacatcctaagaccagatgccttcccgaactcctcacttcagggacagaagctgttgaaggaaggttcagaatggctgcttctttgctctatctgagtattgctctgaaatccccagttaacctctctggtctttattccctcatgcaccccgtgtttttccaacttgttttttattcccacccaagactctggacgacctggaggaacgagtgaaggaggctggaattgagattactttccgccagagtttcttctcagatccagctgtgcccgtcaaaaacctgaaggtcagatggctgggagtggtgggctctgtttacggagggaccaagctgggggacagtgactggttggagaggaaagccaggcgggggcaggttttgattctctgaggcaatagcatctcctggggaagtttagctccatcttccagttgacgtttattcactatacgttgagcgttaccctgcactaagcactttgggatgggaaatcaaagctgtgaagacatctggcttagcccctcaggcattcccgggcatccctcaggagctgtttctttctctgttgtagcgccaggatgcccgaatcatcgtgggacttttctatgagactgaagcccggaaagttttttgtgaggtggagttggatctgaagagggaggggcactgggtgggagtttcccttggttttcttgtggggcctcctcttggcatctgtgcctgagttgatagcatatgatctgaggtgacgattcataggatgtctctgtctgttggctctgactgcatcccttgtctgcacacacatgatactttcttcagatctcatttttctactgctttgtgtttcctgagaagcccatgaattccatctgtcctgactggctggaaaaggccactcagaaatacaggggctggggagaaacttagaaggaagaattgtcagcctttcctactatccccaagacttgtagatttctctttttagttctactgctcttccctgattcccaagaggctaaatagtatcaagtgagataagacaaaaacaaacaaatgagcaaacaaaaactcagccattctcctctgtattcaggtgtacaaggagcgtctctttgggaagaagtacgtctggttcctcattgggtggtatgctgacaattggttcaagatctacgacccttctatcaactgcacagtggatgagatgactgaggcggtggagggccacatcacaactgagattgtcatgctgaatcctgccaatacccgcagcatttccaacatggtgagagtgtggggacttgcagtctggcacctgggagggtggagaggactgagggggccttgcaggggaaagggtggcagggagagggtgcggaatttggatataaaggagaagagggggctgtgcccaccctgaacttgtctgcattatgtttcctgtggatcctacctttgctctgacttccttgggtagagagagaaaaaaaaaaaaacgatggagttgtatgttcagtaggttcctgatgagtggaagggctgttaccatggagacgaggagcagttggtgagaagtcaggaggaaccggcattaatgataatatggatgcttgtatactcaagcacacctttacaggagcactgtgtctgggcagaattgcatttcattttcttggtgatttatgttagtgttttagagttgcttaatattcactcatgattgatatgcaattagcttggatcctgttgctttttttaatgattctttttttagaattttatgtggagaaggggcttttgaaatcatttagccccagacagctggttaatgacagacttggagcgaggaggcgcattctctgatttgagagggctggggcagccctgcagctgaggggcagaagtgagtgtgggtgtgggcacaggggaagaggcttctttgttgctcagcactacattgtaaagagtacaggaattttgggtaagctcgatacggccacctatgtgtctgcttattacaccaagtgtgtacctgctttggagagcatgttaggggtgagttaatggttgtaaagccccaaaatagcttgatttaaaaagttttactaacagtggcatttgtgtggtacttagattcatgatttcagggattctaacagcaaaactctgatgtggacttatctacattttgtagaccaggaaaatgagactcagagtggtttaatgacttgtctcaggtcatgcagctactcagcagtccagctggaattgaatcctagttaaatctggctccaaactgctctgctcatcacttcccatggaaaaccatgaagcctgactaaaaagtttgtacttttatctgctaacactgtttagctactggcaattgctgagcaaaggagaaataagatttaggaagttgactctggtggtgtgttgtgatgaaagatctgctgccacatggactctgatgatacacactgttttgggacattctaaatggactctatgttttaaggtatgttagttgaaaaatacaatgaaaaaattttggaagatcactttcctgtagagtacccaagaggtgagtcatccataaaacctgggaaagtattggaactggctaccaaagccagaaagacttgttggtgccctgagcccaggacttgccaatcgttgcttctgtcttatagcagggagctagaggaggctgacagaaaacagggatttggctggatctagtggctcacacctgtagtccccagcaccttgggaggccaaggcagaggatcactggagcccaggagttcaagaccagcctgggcaatatagtgagacccccagctctaaacaaaaagagagagagagagaacagagagatggttagggacatagagggacacctgagcattggggtgggaagacttggaaggtccctttctgactttgtgtctagagaaagatggttcctgcttttgaggccatagggcttccagtgggaccagcctaaaatgccagtggggaagccaatgttttctgaagaggatagagcagtcttaacaataggttaggggcaaaagagattatagattaatcaaacagcacaaatagaagtggatcaaagcaagggttggacctagggggccggagccatggagacttagaaaagaagcagagttgcttttattccctaaggatggccttatgtttagatcaatagttctcaaactttaacatccgtcagaaccacctggaaaggtagttagttcacaggttatcaggcccttcccctggaaattctgattcagtagatctgggctagggcctgagaactgacatttctagcaagtccctggggatgcagatgtactggtctggggatcacacctcgagaactattagttagggtagtggttttcaactactaccctagactcagacgctatactatctggaggcatttttggttgttacagttgggggtaggggatggggagggatacatgctcctgatatctaatgtgtagaagccaaagatgattctaaatatcctacaaagcacagcccctggcaacaaagaattatcttgctcaaaatgttaatagtgcagagaatgagaaaccctagtttagagaaaacatctttaggggcaatatgtggaaatggagagtgggttagagtggttttagagaaatgtagctgtgggctagaggggaatgtgggaggtggcatcctggagataagattgtgaggaaatcttgattggggtagagatcccatcagacctaggaccagtacaaactaaaaagctacctcaagatatacattttagcccactgtcaagcatccattcttgagagccagacaaggctgttaaaaaaattaggtataaatttgcacttggttgattaactaattgctgtgggttgaggggtctttattgttcagatttccttaagctgcagagtagagtgtctctttgacaatctataactgtatctttactgactcaagggggaagcattctactcttctttactcttggggtggcaggagcagtggtgcccccagtggttaggcgtgttagtggtagtgacctggcgtgagcacagggtctgaccacctgagcaggggaccgcatcgtgctgagcagattaatccctttctttctgggtgatttttttgatgccatatttaccttgaactgaagattggatagaccaatctttcaatttgaagccaaaagactactcaaagtattagcctagctgctatttgtgcaggtgctcttagagagaggcagtctcatgtacagagactgtgtagggtggctggtaagagtatggattagctctgctactcattaatagtataacttttttataggcaagttatataacttttctgtgcctcagttttcttatctctaaaatggggataataacacctcattggattgtttgaggattaaataaggtaatatagtttcctcaggaaaatgctcgatacgtcctaaggactgtatacatgttagccaccatcatcgttatcattatcatcatcatcctgtgtaaggagggatcgatatcaatgaaacatttcaacaaaagagttaagaggactcagtgatttgaaagggtctgatgtaattccaaggcttcagtctcatttactgggagctgtttgggagtaagaaaaaattgagcttcatcttggatattttgattttgagattattcatcatacattaaaaatgcctcagagtcagttagaaatatggacttgaggctgggcgcggtggctcacgcctataatcccagcactttgggaggctgaggcaggtggatcacaaggccaggagttcaagaccagcctggctaacatggtgaaaccccgtctctgctaaaaatacacaaatcagctgggtgtggtgtcgtgtgcctgtaatcccagctacttgggaggctgagacacaagaatcgcttgaacccaggaggcagaggttgcagtgagccaagatcgcactactgcactccagcctggcaacagagcaagactccatctcaaaaaaaaaaaaaaaaaaagaaagaaagaaagaaaagaaatatggacttgaaatattgggctgaaattatagatctgagtatcaataacaaagatgaggttgagagtcaaggaaattcacgtagagaaaatgtaacttacttcatacccagcatttttatacatgttctaatttcatttcatactattttagatagtattattctcattttaaagctgaataaccaactagtgaggtttaataacttgtttgagatttcatagcaggtaaaatgattagaatatgaattcatccatttatctatccaacagacttttttttttttttttttttttttagtagagacggggtttcaccgtgttagccaggatggtctcgatctcctgacctcgtgatccgcccgcctcggcctcccaaaatgctgggattacaggcgtgagccaccgcgcccagcctttttttttttttttttttgaggtagagtatccctctgctgcccaggcaggagtgcagtggtacaatcgctgcagccttgacctcctgggctcaagtcatccacccacctcagcccctcccaagtaagctgggatcacagacatatgccaccaagtctggctaactttttttttttttctcgagatagagtcttgctctgttgcctaggctggagcacaatggtgtgatctcggctcactgcaacctctgcctcctgggttccagtgattctcctgcctcagccttctgaatagctgggattacaggtgcgtgccaccatgcccagataagtttttgtatttttagtggacatggggtttcaccatgttggtcaggttggtctcgaacacctaacctcatgattcaccctcctcagcctcctgaagtgctgggattacaggcgtgagccactgctccaagccaagtccggctaattttttttttttctgagatggagtcttgctctgttgcccaggctggagtgcaatggcatgatcttggctcactgcaacctccgcctcctgggttcaagcgattctccgattctcctgcctcagcctcctgagtagctgggattacgggagcccaccatcacacccagctaatttttgtatttttttttttgagacagagtttcattcttattgcccaggcttgagtgcaatggcgcgatcttggctcacagcaacctccgcctcccaggttcaagccattctcctgcctcagcctccggagtagctgggattacaggcatgcgccaccacacccggctaattttgtatttttagtagagacagggtttctccatgttgctcaggctggtctcgaactccggacctcaggtgatccacccgcctcagcctcccaaagtgctgggattacaggcgtgagccaccgtgcccagctaatttttgtatttttcatagagacagggtttcaccatgttggccaggctggtcttgaactcctgacctcatgatctgcccgccttgacctcccaaagtcctgagattacagatgtgagcctccgtgcccaggccaagtctggctaatttttaaaaaaattttgtagagttgggtcctctctgttttgcccagtcttgtctcaaactcctgggctcaaggaatcctcctgcgttggcctctgaaaatgaaaatgttgggattacaggcgtgagccccctgtgcctggctgcctttttttttttttttttttaaaggcagagtctcactccatcgcccaggctgaagtgcagtggcgtgatctctgctcactgcaacctctgcctcttgagttcaagcgattcttctacctcagcttcccaagtagctgggattacgggagcccaccaacacacccagctaatttttgtatttttagtagagacgggtttcaccaggttggccaggctgtctggaattcctgacctcaggtgatccaccctccttggcctcccaaagagctgggattacaagtgtgagccactgtgcccagcctgacttgttttttataatgccttttttttttttttttgagacggagtcttgctctgtcgcccaggctggagtgtagtggcgtcatctcagctcactgtaacctccacctcctgggttgaagtgattttctcacctcagccctcagcctcctgagtagttgggactgcaagtgcacaccaccatgcccagctaattttttgtattttagtagagatggggtttcaccatgttgcccagctggtctttaactcctgagctcaggcagtctgcttaccttggcctcccaaagtgctaggattaaaggtgtgagccactgtgcctggccttttttttttttttttttttttgagcagttttagtttcccagcagaattgagatgaaggtacagaaacttcccatatgcttcccacatgcatagccttctacattatcgacatcctccgccagagtggtacatttgttacaactgatgaacctacattgatacatcataatcacccaaagtccatagtttacattagagttcacccttggtgttatatattctatgggtttggacaaatgtataatgagacgtatctactattaaatactttacagagtattttcactggcctaatccaatggacatttattgttacttcattatggttgggcacagtgctagatgctgatgattaagagagggcatgggatttggtcttgtcctcaagggtagaacctaggcccattgcatcttcaaagcccaggctccttcaaagcccagtgtagtagcaactgctgtaccttgcctgtgccctttgcgtatctcactcctctatctctctagaaagttggagagaaaagtgagcaaggcatgaggaacaaagttatttatttattcttcattcatctatttattctttcattaccgtttgtgttaaaacattccaaacccaaacaattatttgtatggtcccctgtgtattacttgtggtttcccaagaagtagttgctaagcttttccttgtatggtttctgtgaggtaaggaaggaatgatgtgattttctccagtatgtagaatgcagttccaagaggttaagtaatttacttacagttatttagccaaacaaggttactgcaaggtatatgaagtcaggtctcttgacccagttcatgagagagttaaaggaactatcattctttttagctttcatggaaaaagaaggttgagtgttgggaggggtgtgggtaggattgataatggacttcaaaaatgtgaagggtatttctgtagttttcattcttctgaaagccttctaagaggcagtgaaccaaaagcacacaagaatggcaagaagttagcatgctgaagaaatatcctcctggctggcaagcagagtgagaagactgctatcaccttttctagaatcttttggaattgtaggagctgttagatcctgggttaactctatgaagaaagtcagaaggatcagagaacatcagtgtcacagctcttcattggaatatccatgtctcctcctttactctgctctaccttccatcctttgccactaattatccagagtgtttgtcaaaattctctgtttgcagttctgagctagcaactgtacacactaacaccatcagacacagctaatacctactctagtctagtagcttccgatctaaggcagacacatgggtatagttaaagattttgaatgtacatgtgtccaatctgacaacagtaacacaaaccatccattcaagtagaagtgattgagtcagaattggattgcaccccttcccccacacccacacacatttcagttctttcctcatgattttttcctcccaagacatcccaggaatttgtggagaaactaaccaagcgactgaaaagacaccctgaggagacaggaggcttccaggaggcaccgctggcctatgatgccatctgggccttggcactggccctgaacaagacatctggaggaggcggccgttctggtgtgcgcctggaggacttcaactacaacaaccagaccattaccgaccaaatctaccgggcaatgaactcttcgtcctttgagggtgtctctgtgagttaaaacttccttcatactcccctgtcttcccaatcttgagagagactcccaagaggcaccttctacaaacatgcattctctgtttttctcagttacttctttgcagaatcagtctccgaccagagaagtagggaccttcaaattagaagaacccatcaaagactagaggaaaaaaaatgatgtattccatttttttaaacccctcccctcatttcttttcaaactagaccaagtattcatgagtcagatgagaactataggattttgaaagacaaaacagtctgaaaggtcatcttcttattccttttaaaatgaaaagattagtttccagagagatttgctgacttgcttaggccacacaaccagaagcctgctggtgttctgtctggggattttttcccattcaaatctcataagtgaagctccttctccaaagaataatgtttctaaaatctagggtatgggcatctggggtatgtcctatatgcaggcaaatgccataaatagcattcattcagaggctcaattacatcaaaaacagaaggatttaaagagtccctgatgttctctttcactcttgcttttgtctcctttgccttgctccacatgttccttccctcagggccatgtggtgtttgatgccagcggctctcggatggcatggacgcttatcgagcagcttcagggttagtacaggggcaggaggggaccggacatgggggctaggctggggctgggctgggatgccccctggggaagaatgccagagacatcacaagattgccctggcacctcccaacttctgcccttctcttttaactctgttcatcaagcttgtaaataataataataataagcttaactacaagaagattgatgtctttgagttgcactggttttgctcttgaaaagaggtgtgcaggctgggtgtggtggctcacccctgtaatcccagcacttttgggaggccaaggcaggcagatcatgatcatggtcaggagtttgagaccagccagaccaacatggtgaaacctgtctctaccaaaaatacaaaaaaaaaaaaaaaaattagctgggtgtggtggcaggtgcctgtagtcccagctacttgggaggctgaggcaggagaatcacttgaacccaggaggcagaggttgcagtgagctgagatcacgccactgcactccagcctgggtgatagagtaagactctgtctcaaagaaaaaagaaaagaaaagagacatgcaaattaaaaacagctactctctttcccagtggcttccattaatttcaggaatttccccttgagtggcttgggttgagaggttgatgacctgtcagttagactcaagaaagctgaatctaggagaaccgctattttttttttaagggaatctgccaaatttccttgctgtgtaaagcttcaatgtgtatagcttggcttttgtagattgtattttcttgaaacttagcacacaggtatttgcagaacttctaggagttaatttttctgctccactcggctctcagtcttttacggcatggccaagagagctatttcttggcctcctgtgaaaagtttctttcttcctttctccccacctccacatcctttcagctcctctttgtatccaggacaagaggaaatggacttcagccatggtgaaaggagtgtgagttggcttttgaaggaaaagttatggtaacggaaacagttctagaacagaaatcttagaaatgaccaaattttactcaatggcgctttaagaggcagatataacttatccaaggaattaaaacccaagccaacagaagagaatgttctaaaattaaaatgaaagccactgggaaaatagagcctgcccatcatgagaggaagaataagcagaaatatgtgtaaagctttagaagccaaaatcaaagtgagagacatctcgccgagagaggtgtgaggaatggaataggtggcagacatgttgtggagcctcctcactgaagacttttaaacatagatattcttatttatttgagttgtcttgggaaccaccttatattgcttttaagtcatgttgctgattcaagagtctcgtaggtccttccaagcatccttagggcctcaggtgaaaataaaatcagatacaaccatgcaaagctctagggaagtgggaagttgaaaatgcctaggatcagctctttggctacctgtggtcactccttttattgtcgtctgcccaggtggcagctacaagaagattggctactatgacagcaccaaggatgatctttcctggtccaaaacagataaatggattggtgagtggatcttgtttgtattttccttcagcccctctcgacagtcaagggaaaaagtcatgcctttgagtgaggatggaatggtagagactgttaggttggaatgtggctggcagctgggccaggagaaagggttaagtgagagtgaatacaacccctaaggcgtgggtaggggagactggtgtatttggagagggaataggcggtggttagtactatttttaatggtgcattgctggggtaactggggattagaggcagggggtgggcagagggcgggaaatggaaactccatttgggtttcccagatgtcctggtgtcttgatatatttgaaccagctacttcaagcccagagctgtctctttgtctgtctctgtcaggaaaacggttgcttaaactatggaggaggagggaaaacctcatgtaattgtcatctgccaaaatgtgctttttatttttatatgtatttttaaaaattttcctatttttatgtaatttagaggtagacgtgcagttgtgttacatgaatatattgcatagtggtgaagtccgggcgtttagtgtgcctgtcacccgaacagtgcaccttgtacctaataggtagtattacatccctcaaaatatactttttaaagagagaaagcaagcagttattctttgtgtacttggtctaaatgataggacataggagagaaactgaaggtggacaaaaggaaggacctactgataaaagaaagcctccttgagaatgaaggggaggctcaaccattgaagatggctgccgtctgccctgcccagcagatatccagtcattcccagcactgctggagttttgcccttttttttttttttttacaattcgaatttaggacaatgttctggattgctataaatgctgcatggcctaaattattctttaaaaaaaaaactaagcaaattgaaattagttttttttggtgaactctgacaaatttgaacttccccctaataataactggaaaacatatttgggaatattaccctgccaggattaaaatttcagattagctttccttctttttttgtttgtcttaagaataggtgtccacactagatacttcaaggcctttttagctttatgattccataattgtcatttaaaactttgatttgggttataagaaaccttataacattttttaatgatccccttctttctcctcccattttcctttgctgtaagaaagacagaaaaacttaaagaacaaacaaaaacaaagactacaactttggggacatgcctcagcatttcccaacctatggatagaccattcactccatcttctcatctcatttctggttgcttcctaacggccccagtggcactgagcattctgcctgcagtaacctctgtccagtgcagttagggcctcatgtccccagccaatgactgaatgtccatcagcaatctagttctttgcccttttctcctatcccgtcttcattcctttgtcctccttcccttctcttttcccttcccctcttcctcccctgtgccatgcaggagggtcccccccagctgaccagaccctggtcatcaagacattccgcttcctgtcacagaaactctttatctccgtctcagttctctccagcctgggcattgtcctagctgttgtctgtctgtcctttaacatctacaactcacatgtccggtaagtttctcttctgacgttttccttgtctgcctctctgagatactgatcatgttcctggacaggatgagaataaaacctgtgtaactcccatggccatgtatcatggagtttttcattctgacttgttgagaatgaaaacagggaaaccagatataacccccactcctactccaaagtagctaacgggaggaaaaaagaaaagaagagaaaaaaacaacctttggggccaggtctcacagtcttggactctacataaatagcctgtattctagtgggggcctgtgcttgggaagccctctgcaactccatcttcagccccatgactgcattgctctgcctctcaaggctccactgtcttctccaatcctgtcttcctttagcccctggccctgaaattagggtcatgccattgcgtggtatttggagagctcagcctccctggagaagaggggtaattctctctccctctcaccctctccacctctgccctagttatatccagaactcacagcccaacctgaacaacctgactgctgtgggctgctcactggctttagctgctgtcttccccctggggctcgatggttaccacattgggaggaaccagtttcctttcgtctgccaggtgaggaggtggtgggcaaattccttacaggatgtgactctcccacccgtctcaggagcaccttccatgatttatgattctctgcccttcctcctcagctttccctgactcttgtccctgttctttccttctagcatcacccctctgttctctgtttggctctgtcccttctttctgtgtctgcaggccattttcattctgtagtttacttgtcagttccaaggttgccatggcaggccttgcagagaagaggagggagccattgaaggcaaaggaaggggatctgctcaaaggtctcctgaacaatggtggcttgtctgtggtatgggggctgagaatcagaactgtggactttttttgggagcctttgttgggtttggaaggatagaagcagagatggaaacacagcagagagttggggggaagggaccactgccacacagggaggaggggctctgggactgttggtacatggaaggttctagtgctgtggggagaggccagcttcaacagtgatagttgagtggttctcttttccactggtggaaacacccactctttctcctgatctgcctgcctgtccttgctctctctttttcctctgctctgtgctgtcctgatcatacatctgtgcacatggcatttccatgcacatgcacatgcagttcatcaggaatcctctgttcccagtgaggccagagtgcagctggagaagcagacaattagctgtagtgcaataggagaggttccagagtagggatctgcacaaagtgctttgggggcaaagaagggaacacagttcactgctggcgtgattgggtggacctcactgaagaggtggcatttgaatactgaaggacaaataggattttatcagctagagaaatagaggaaggctacttcaggggcatagggagcatcgtgtggctagaaaatacatgaaagagagtagatgaagagaaagtgagtagttcagcatggctggagcgtggggtaggtgtggggctgggagatgagcctagctggacaggtggatgggagcatgttgtgaagggtctgtgtcatatccagaagtgttcaggctataacttatagatattggggagtggttggaggtttttggccactaaagccaggaggttttagcaagatcaccctggtggtgtggaagtagagggtggatgggaggaattgttcaaggtggggagactgctctcctcctgccgctccccgtcctgctcacattttcgcatcctccctgtgccaccatgagctccctgcccgtgctccctgcccactctcccttagggttctgcccatccttactgcagtcccggctactactctaccctgttctgcctgtgccctctcttcctttctaggcccgcctctggctcctgggcctgggctttagtctgggctacggttccatgttcaccaagatttggtgggtccacacggtcttcacaaagaaggaagaaaagaaggagtggaggaaggtgagctgctgcccaatcctcagcccccagatccttggctcctggggcacagagcattttcccctgacgtgcctgttctccccacatatttatccagactctggaaccctggaagctgtatgccacagtgggcctgctggtgggcatggatgtcctcactctcgccatctggcagatcgtggaccctctgcaccggaccattgaggtaccactggagaggaggtgctatggtcaggagaatgagcagggctcagtggccatcagggccctggggctgtgtgtgtcttgagggatgaagctacttggagagagtgccttcctcgtattggaagctcttcctttccttcctagaaggagcccctcataggcctccagattcagctgaagaaaggaaggggtgggaatctgggaagggtgtgtagaacttccaggcatcagggaaagtggggaacaagcacctccaagggttcaggaaaacattcttaggcctagaatgagatttggcatcagcattgagggtctcataggaaaacagttggaagccagagactgagaagcgttgaggagaggaggggaggctggcaaccatctttcttgtgaccttgtttctgccctagacatttgccaaggaggaacctaaggaagatattgacgtctctattctgccccagctggagcattgcagctccaggaagatgaatacatggcttggtgtgtgggatgtgggcaaaggagggcagggatgcacaaaggcaggagggaaggcaggggtagagggcttggagggagaggggtctttggaagaggaggtagagagcttgtcaacccagtttgaacaccctactctttgttattgcactaatcttttctgagaataggggagagttgctcttttgctatgaggagcttagggcccaaagcacagaaagcacagatgaagaacttgtgttcagcagaggaacaagtgggggtaaccccacctccagacttgacattatcttttagatcccccttggccttattagcattgttcgattcatggtcacaaattgcaaacctaccctctgcctggaaagccaccttcccacctgtagggtaagggtgaggcatgtgtggcccagactggcctatttctagatattcaacaagcccttgcctgactgacagcagcttgccaccattgctttcctgtgtgaatcccaggaaaaagtgatgtggtctgggcaagttgggtggacataagggataggggacacagggtgaggtttgctaggtcagaggggttggattggagaggagggccccctttccatttcagagtaggtgaagggcagagaggggatggggattgagtgaggagcattgtggtccttgttgctcaagtgactctctcctgccatcctaggcattttctatggttacaaggggctgctgctgctgctgggaatcttccttgcttatgagaccaagagtgtgtccactgagaagatcaatgatcaccgggctgtgggcatggctatctacaatgtggcagtgagcactgaccccatggcattgaccctgtaggctgaccacagcagcccagatatagaggactaggaagaatcaatgctagatctgggatcggttgcttagaagtcttaaaaagtttgttaattcttcaggtctataaagcactttacagtttacaaagctcactacagacattgtatcattaatcttgcaactacccagtgaagtagatattagtatccccactttataggtgaggaaacagaaacacagagacgttaaattgcttgtctgtggttaatgggctggactctattgacatttcctgccagggaccgactctggaggacccggaatctgtgcatagagatcctgggagttcctgccttgaggggaggggttaaccaagagtgaaaactggtttgggacagtttgagatttttctcaatctatatttgaggatgatcctgaatttggatccttttcaaagggaaagttcaccaggaaactgtctgcatagactccctcccatgggaagtaaactctggatcttgtctgagcctgcagacctgagactccctcaatgtgtctttccctctaggtcctgtgcctcatcactgctcctgtcaccatgattctgtccagccagcaggatgcagcctttgcctttgcctctcttgccatagttttctcctcctatatcactcttgttgtgctctttgtgcccaaggtaaggatctggcttttctcccaccctctttgttcccatgttccctccatccctccttcctatattactgagttcctctgcccttccgttcaccctcctctcactcctccccttgttttgggcccaactcttatcagcattccttccacctccaaccttccatcagccagtcactagtacagtccttgctgggccaccccacgcccaaacatttgcccccagatgcgcaggctgatcacccgaggggaatggcagtcggaggcgcaggacaccatgaagacagggtcatcgaccaacaacaacgaggaggagaagtcccggctgttggagaaggagaaccgtgaactggaaaagatcattgctgaggtgcgggggtgggtgtcagggtagggtgttggagtggtccaggaggcttgcgtcttagcttgggttgtctgaagccaagcctgagatacagggtcagatgttcttggctcatggagggagggtcctaggagacaacctgtaaggagtgaatggagcagcataggggaggggaaagggctgagcaagattctatctcaggcaaaatccagtgttggcctggcaggtggaagggctctggagtgggagctatgtggttgactcagcctccttaaggcaagaggatggctgttggctgtaggtgacaactggagagaggcagctgtgagcctctagtagtcaacactcacagcagctgggtgtagcatgcagccccagcataaaggacctgggcaggcgttcactgtgccccaggctgtcattaggggctggtgcaatgccaaagagagggatgttccaactgggttgacacatctctctgatttattggaagctctgtgcactgacttttctctccttccccactttttccttttgtttttaaattctctcttatttccctgatcgcattttttctatcggtatccttatgttctctggcttttcttgttctgttttgatttctccttttaatttattctgtccacttaccctacgtcctccccctacatttttctgtgcccttcctctctttccctgtgcccttcctctctttccctcctccccactccttcatcacctcctcttctcctactatcccaattgtgcttcttcctccagaaagaggagcgtgtctctgaactgcgccatcaactccagtctcggcagcagctccgctcccggcgccacccaccgacacccccagaaccctctgggggcctgcccaggggaccccctgagccccccgaccggcttagctgtgatgggagtcgagtgcatttgctttataagtgagggtagggtgagggaggacaggccagtagggggagggaaagggagaggggaagggcaggggactcaggaagcagggggtccccatccccagctgggaagaacatgctatccaatctcatctcttgtaaatacatgtccccctgtgagttctgggctgatttgggtctctcatacctctgggaaacagacctttttctctcttactgcttcatgtaattttgtatcacctcttcacaatttagttcgtacctggcttgaagctgctcactgctcacacgctgcctcctcagcagcctcactgcatctttctcttcccatgcaacaccctcttctagttaccacggcaacccctgcagctcctctgcctttgtgctctgttcctgtccagcaggggtctcccaacaagtgctctttccaccccaaaggggcctctccttttctccactgtcataatctctttccatcttacttgcccttctatactttctcacatgtggctccccctgaattttgcttcctttgggagctcattcttttcgccaaggctcacatgctccttgcctctgctctgtgcactcacgctcagcacacatgcatcctcccctctcctgcgtgtgcccactgaacatgctcatgtgtacacacgcttttcccgtatgctttcttcatgttcagtcacatgtgctctcgggtgccctgcattcacagctacgtgtgcccctctcatggtcatgggtctgcccttgagcgtgtttgggtaggcatgtgcaatttgtctagcatgctgagtcatgtctttcctatttgcacacgtccatgtttatccatgtactttccctgtgtaccctccatgtaccttgtgtactttcttcccttaaatcatggtattcttctgacagagccatatgtaccctaccctgcacattgttatgcacttttccccaattcatgtttggtggggccatccacaccctctccttgtcacagaatctccatttctgctcagattccccccatctccattgcattcatgtactaccctcagtctacactcacaatcatcttctcccaagactgctcccttttgttttgtgtttttttgaggggaattaaggaaaaataagtgggggcaggtttggagagctgcttccagtggatagttgatgagaatcctgaccaaaggaaggcacccttgactgttgggatagacagatggacctatggggtgggaggtggtgtccctttcacactgtggtgtctcttggggaaggatctccccgaatctcaataaaccagtgaacagtgtgactcgg

SEQ ID NO: 4 - protein, 961 aa, unidentified [sequence omitted]

SEQ ID NO: 5 - RNA, 24 nt, synthetic construct
  misc_feature 1..24: note = EGFP siRNA (sense)
  source 1..24: mol_type = other RNA
gcaagctgaccctgaagttcattt

SEQ ID NO: 6 - RNA, 24 nt, synthetic construct
  misc_feature 1..24: note = EGFP siRNA (antisense)
  source 1..24: mol_type = other RNA
atgaacttcagggtcagcttgccg

SEQ ID NO: 7 - RNA, 19 nt, synthetic construct
  misc_feature 1..19: note = Firefly luciferase shRNA
  source 1..19: mol_type = other RNA
ctgacgcggaatacttcga

SEQ ID NO: 8 - protein, 360 aa, Photorhabdus luminescens
  REGION 1..360: note = luxA
MKFGNFLLTYQPPQFSQTEVMKRLVKLGRISEECGFDTVWLLEHHFTEFGLLGNPYVAAAYLLGATKKLNVGTAAIVLPTAHPVRQLEDVNLLDQMSKGRFRFGICRGLYNKDFRVFGTDMNNSRALAECWYGLIKNGMTEGYMEADNEHIKFHKVKVNPAAYSRGGAPVYVVAESASTTEWAAQFGLPMILSWIINTNEKKAQLELYNEVAQEYGHDIHNIDHCLSYITSVDHDSIKAKEICRKFLGHWYDSYVNATTIFDDSDQTRGYDFNKGQWRDFVLKGHKDTNRRIDYSYEINPVGTPQECIDIIQKDIDATGISNICCGFEANGTVDEIIASMKLFQSDVMPFLKEKQRSLLY

SEQ ID NO: 9 - protein, 327 aa, Photorhabdus luminescens
  REGION 1..327: note = luxB
MKFGLFFLNFINSTTVQEQSIVRMQEITEYVDKLNFEQILVYENHFSDNGVVGAPLTVSGFLLGLTEKIKIGSLNHIITTHHPVAIAEEACLLDQLSEGRFILGFSDCEKKDEMHFFNRPVEYQQQLFEECYEIINDALTTGYCNPDNDFYSFPKISVNPHAYTPGGPRKYVTATSHHIVEWAAKKGIPLIFKWDDSNDVRYEYAERYKAVADKYDVDLSEIDHQLMILVNYNEDSNKAKQETRAFISDYVLEMHPNENFENKLEEIIAENAVGNYTECITAAKLAIEKCGAKSVLLSFEPMNDLMSQKNVINIVDDNIKKYHMEYT

SEQ ID NO: 10 - DNA, 720 bp, synthetic construct
  misc_feature 1..720: note = Enhanced green fluorescent protein
  source 1..720: mol_type = other DNA
atggtgagcaagggcgaggagctgttcaccggggtggtgcccatcctggtcgagctggacggcgacgtaaacggccacaagttcagcgtgtccggcgagggcgagggcgatgccacctacggcaagctgaccctgaagttcatctgcaccaccggcaagctgcccgtgccctggcccaccctcgtgaccaccctgacctacggcgtgcagtgcttcagccgctaccccgaccacatgaagcagcacgacttcttcaagtccgccatgcccgaaggctacgtccaggagcgcaccatcttcttcaaggacgacggcaactacaagacccgcgccgaggtgaagttcgagggcgacaccctggtgaaccgcatcgagctgaagggcatcgacttcaaggaggacggcaacatcctggggcacaagctggagtacaactacaacagccacaacgtctatatcatggccgacaagcagaagaacggcatcaaggtgaacttcaagatccgccacaacatcgaggacggcagcgtgcagctcgccgaccactaccagcagaacacccccatcggcgacggccccgtgctgctgcccgacaaccactacctgagcacccagtccgccctgagcaaagaccccaacgagaagcgcgatcacatggtcctgctggagttcgtgaccgccgccgggatcactctcggcatggacgagctgtacaagtaa

SEQ ID NO: 11 - DNA, 2387 bp, Photinus pyralis
  misc_feature 1..2387: note = Luciferase gene
  source 1..2387: mol_type = genomic DNA
ctgcagaaataactaggtactaagcccgtttgtgaaaagtggccaaacccataaatttggcaattacaataaagaagctaaaattgtggtcaaactcacaaacatttttattatatacattttagtagctgatgcttataaaagcaatatttaaatcgtaaacaacaaataaaataaaatttaaacgatgtgattaagagccaaaggtcctctagaaaaaggtatttaagcaacggaattcctttgtgttacattcttgaatgtcgctcgcagtgacattagcattccggtactgttggtaaaatggaagacgccaaaaacataaagaaaggcccggcgccattctatcctctagaggatggaaccgctggagagcaactgcataaggctatgaagagatacgccctggttcctggaacaattgcttttgtgagtatttctgtctgatttctttcgagttaacgaaatgttcttatgtttctttagacagatgcacatatcgaggtgaacatcacgtacgcggaatacttcgaaatgtccgttcggttggcagaagctatgaaacgatatgggctgaatacaaatcacagaatcgtcgtatgcagtgaaaactctcttcaattctttatgccggtgttgggcgcgttatttatcggagttgcagttgcgcccgcgaacgacatttataatgaacgtaagcaccctcgccatcagaccaaagggaatgacgtatttaatttttaaggtgaattgctcaacagtatgaacatttcgcagcctaccgtagtgtttgtttccaaaaaggggttgcaaaaaattttgaacgtgcaaaaaaaattaccaataatccagaaaattattatcatggattctaaaacggattaccagggatttcagtcgatgtacacgttcgtcacatctcatctacctcccggttttaatgaatacgattttgtaccagagtcctttgatcgtgacaaaacaattgcactgataatgaattcctctggatctactgggttacctaagggtgtggcccttccgcatagaactgcctgcgtcagattctcgcatgccaggtatgtcgtataacaagagattaagtaatgttgctacacacattgtagagatcctatttttggcaatcaaatcattccggatactgcgattttaagtgttgttccattccatcacggttttggaatgtttactacactcggatatttgatatgtggatttcgagtcgtcttaatgtatagatttgaagaagagctgtttttacgatcccttcaggattacaaaattcaaagtgcgttgctagtaccaaccctattttcattcttcgccaaaagcactctgattgacaaatacgatttatctaatttacacgaaattgcttctgggggcgcacctctttcgaaagaagtcggggaagcggttgcaaaacggtgagttaagcgcattgctagtatttcaaggctctaaaacggcgcgtagcttccatcttccagggatacgacaaggatatgggctcactgagactacatcagctattctgattacacccgagggggatgataaaccgggcgcggtcggtaaagttgttccattttttgaagcgaaggttgtggatctggataccgggaaaacgctgggcgttaatcagagaggcgaattatgtgtcagaggacctatgattatgtccggttatgtaaacaatccggaagcgaccaacgccttgattgacaaggatggatggctacattctggagacatagcttactgggacgaagacgaacacttcttcatagttgaccgcttgaagtctttaattaaatacaaaggatatcaggtaatgaagatttttacatgcacacacgctacaatacctgtaggtggcccccgctgaattggaatcgatattgttacaacaccccaacatcttcgacgcgggcgtggcaggtcttcccgacgatgacgccggtgaacttcccgccgccgttgttgttttggagcacggaaagacgatgacggaaaaagagatcgtggattacgtcgccagtaaatgaattcgttttacgttactcgtactacaattcttttcataggtcaagtaacaaccgcgaaaaagttgcgcggaggagttgtgtttgtggacgaagtaccgaaaggtcttaccggaaaactcgacgcaagaaaaatcagagagatcctcataaaggccaagaagggcggaaagtccaaattgtaaaatgtaactgtattcagcgatgacgaaattcttagctattgtaatattatatgcaaattgatgaatggtaattttgtaattgtgggtcactgtactattttaacgaataataaaatcaggtataggtaactaaaaa

SEQ ID NO: 12 - DNA, 10801 bp, synthetic construct
  misc_feature 1..10801: note = pAKlux2 bioluminescence expression vector for Gram-negative bacteria
  gene 466..1908: note = luxC
  gene 1921..2844: note = luxD
  gene 2893..3975: note = luxA
  gene 3990..4973: note = luxB
  gene 5152..6264: note = luxE
  source 1..10801: mol_type = other DNA
gggcaaatattatacgcaaggcgacaaggtgctgatgccgctggcgattcaggttcatcatgccgtttgtgatggcttccatgtcggcagaatgcttaatgaattacaacagtttttatgcatgcgcccaatacgcaaaccgcctctccccgcgcgttggccgattcattaatgcagctggcacgacaggtttcccgactggaaagcgggcagtgagcgcaacgcaattaatgtgagttagctcactcattaggcaccccaggctttacactttatgcttccggctcgtatgttgtgtggaattgtgagcggataacaatttcacacaggaaacagctatgaccatgattacgccaagcgcgcaattaaccctcactaaagggaacaaaagctgggtaccgggccccccctcgaggtcgacggtatcgataagcttgatatcgaattcaggcttggaggatacgtatgactaaaaaaatttcattcattattaacggccaggttgaaatctttcccgaaggtgatgatttagtgcaatccattaattttggtgataatagtgtttacctgccaatattgaatgactctcatgtaaaaaacattattgattgtaatggaaataacgaattacggttgcataacattgtcaattttctctatacggtagggcaaagatggaaaaatgaagaatactcaagacgcaggacatacattcgtgacttaaaaaaatatatgggatattcagaagaaatggctaagctagaggccaattggatatctatgattttatgttctaaaggcggcctttatgatgttgtagaaaatgaacttggttctcgccatatcatggatgaatggctacctcaggatgaaagttatgttcgggcttttccgaaaggtaaatctgtacatctgttggcaggtaatgttccattatctgggatcatgtctatattacgcgcaattttaactaagaatcagtgtattataaaaacatcgtcaaccgatccttttaccgctaatgcattagcgttaagttttattgatgtagaccctaatcatccgataacgcgctctttatctgttatatattggccccaccaaggtgatacatcactcgcaaaagaaattatgcaacatgcggatgttattgtcgcttggggagggccagatgcgattaattgggcggtagagcatgcgccatcttatgctgatgtgattaaatttggttctaaaaagagtctttgcattatcgataatcctgttgatttgacgtccgcagcgacaggtgcggctcatgatgtttgtttttacgatcagcgagcttgtttttctgcccaaaacatatattacatgggaaatcattatgaggaatttaagttagcgttgatagaaaaacttaatctatatgcgcatatattaccgaatgccaaaaaagattttgatgaaaaggcggcctattctttagttcaaaaagaaagcttgtttgctggattaaaagtagaggtggatattcatcaacgttggatgattattgagtcaaatgcaggtgtggaatttaatcaaccacttggcagatgtgtgtaccttcatcacgtcgataatattgagcaaatattgccttatgttcaaaaaaataagacgcaaaccatatctatttttccttgggagtcatcatttaaatatcgagatgcgttagcattaaaaggtgcggaaaggattgtagaagcaggaatgaataacatatttcgagttggtggatctcatgacggaatgagaccgttgcaacgattagtgacatatatttctcatgaaaggccatctaactatacggctaaggatgttgcggttgaaatagaacagactcgattcctggaagaagataagttccttgtatttgtcccataataggtaaaaagtatggaaaatgaatcaaaatataaaaccatcgaccacgttatttgtgttgaaggaaataaaaaaattcatgtttgggaaacgctgccagaagaaaacagcccaaagagaaagaatgccattattattgcgtctggttttgcccgcaggatggatcattttgctggtctggcggaatatttatcgcggaatggatttcatgtgatccgctatgattcgcttcaccacgttggattgagttcagggacaattgatgaatttacaatgtctataggaaagcagagcttgttagcagtggttgattggttaactacacgaaaaataaataacttcggtatgttggcttcaagcttatctgcgcggatagcttatgcaagcctatctgaaatcaatgcttcgtttttaatcaccgcagtcggtgttgttaacttaagatattctcttgaaagagctttagggtttgattatctcagtctacccattaatgaattgccgaataatctagattttgaaggccataaattgggtgctgaagtctttgcgagagattgtcttgattttggttgggaagatttagcttctacaattaataacatgatgtatcttgatataccgtttattgcttttactgcaaataacgataattgggtcaagcaagatgaagttatcacattgttatcaaatattcgtagtaatcgatgcaagatatattctttgttaggaagttcgcatgacttgagtgaaaatttagtggtcctgcgcaatttttatcaatcggttacgaaagccgctatcgcgatggataatgatcatctggatattgatgttgatattactgaaccgtcatttgaacatttaactattgcgacagtcaatgaacgccgaatgagaattgagattgaaaatcaagcaatttctctgtcttaaaatctattgagatattctatcactcaaatagcaatataaggactctctatgaaatttggaaactttttgcttacataccaacctccccaattttctcaaacagaggtaatgaaacgtttggttaaattaggtcgcatctctgaggagtgtggttttgataccgtatggttactggagcatcatttcacggagtttggtttgcttggtaacccttatgtcgctgctgcatatttacttggcgcgactaaaaaattgaatgtaggaactgccgctattgttcttcccacagcccatccagtacgccaacttgaagatgtgaatttattggatcaaatgtcaaaaggacgatttcggtttggtatttgccgagggctttacaacaaggactttcgcgtattcggcacagatatgaataacagtcgcgccttagcggaatgctggtacgggctgataaagaatggcatgacagagggatatatggaagctgataatgaacatatcaagttccataaggtaaaagtaaaccccgcggcgtatagcagaggtggcgcaccggtttatgtggtggctgaatcagcttcgacgactgagtgggctgctcaatttggcctaccgatgatattaagttggattataaatactaacgaaaagaaagcacaacttgagctttataatgaagtggctcaagaatatgggcacgatattcataatatcgaccattgcttatcatatataacatctgtagatcatgactcaattaaagcgaaagagatttgccggaaatttctggggcattggtatgattcttatgtgaatgctacgactatttttgatgattcagaccaaacaagaggttatgatttcaataaagggcagtggcgtgactttgtattaaaaggacataaagatactaatcgccgtattgattacagttacgaaatcaatcccgtgggaacgccgcaggaatgtattgacataattcaaaaagacattgatgctacaggaatatcaaatatttgttgtggatttgaagctaatggaacagtagacgaaattattgcttccatgaagctcttccagtctgatgtcatgccatttcttaaagaaaaacaacgttcgctattatattagctaaggagaaagaaatgaaatttggattgttcttccttaacttcatcaattcaacaactgttcaagaacaaagtatagttcgcatgcaggaaataacggagtatgttgataagttgaattttgaacagattttagtgtatgaaaatcatttttcagataatggtgttgtcggcgctcctctgactgtttctggttttctgctcggtttaacagagaaaattaaaattggttcattaaatcacatcattacaactcatcatcctgtccgcatagcggaggaagcttgcttattggatcagttaagtgaagggagatttattttagggtttagtgattgcgaaaaaaaagatgaaatgcatttttttaatcgcccggttgaatatcaacagcaactatttgaagagtgttatgaaatcattaacgatgctttaacaacaggctattgtaatccagataacgatttttatagcttccctaaaatatctgtaaatccccatgcttatacgccaggcggacctcggaaatatgtaacagcaaccagtcatcatattgttgagtgggcggccaaaaaaggtattcctctcatctttaagtgggatgattctaatgatgttagatatgaatatgctgaaagatataaagccgttgcggataaatatgacgttgacctatcagagatagaccatcagttaatgatattagttaactataacgaagatagtaataaagctaaacaagagacgcgtgcatttattagtgattatgttcttgaaatgcaccctaatgaaaatttcgaaaataaacttgaagaaataattgcagaaaacgctgtcggaaattatacggagtgtataactgcggctaagttggcaattgaaaagtgtggtgcgaaaagtgtattgctgtcctttgaaccaatgaatgatttgatgagccaaaaaaatgtaatcaatattgttgatgataatattaagaagtaccacatggaatatacctaatagatttcgagttgcagcgaggcggcaagtgaacgaatccccaggagcatagataactatgtgactggggtgagtgaaagcagccaacaaagcagcagcttgaaagatgaagggtataaaagagtatgacagcagtgctgccatactttctaatattatcttgaggagtaaaacaggtatgacttcatatgttgataaacaagaaattacagcaagctcagaaattgatgatttgattttttcgagcgatccattagtgtggtcttacgacgagcaggaaaaaatcagaaagaaacttgtgcttgatgcatttcgtaatcattataaacattgtcgagaatatcgtcactactgtcaggcacacaaagtagatgacaatattacggaaattgatgacatacctgtattcccaacatcggtttttaagtttactcgcttattaacttctcaggaaaacgagattgaaagttggtttaccagtagcggcacgaatggtttaaaaagtcaggtggcgcgtgacagattaagtattgagagactcttaggctctgtgagttatggcatgaaatatgttggtagttggtttgatcatcaaatagaattagtcaatttgggaccagatagatttaatgctcataatatttggtttaaatatgttatgagtttggtggaattgttatatcctacgacatttaccgtaacagaagaacgaatagattttgttaaaacattgaatagtcttgaacgaataaaaaatcaagggaaagatctttgtcttattggttcgccatactttatttatttactctgccattatatgaaagataaaaaaatctcattttctggagataaaagcctttatatcataaccggaggcggctggaaaagttacgaaaaagaatctctgaaacgtgatgatttcaatcatcttttatttgatactttcaatctcagtgatattagtcagatccgagatatatttaatcaagttgaactcaacacttgtttctttgaggatgaaatgcagcgtaaacatgttccgccgtgggtatatgcgcgagcgcttgatcctgaaacgttgaaacctgtacctgatggaacgccggggttgatgagttatatggatgcgtcagcaaccagttatccagcatttattgttaccgatgatgtcgggataattagcagagaatatggtaagtatcccggcgtgctcgttgaaattttacgtcgcgtcaatacgaggacgcagaaagggtgtgctttaagcttaaccgaagcgtttgatagttgatgacctgcaggtcgacggatccggggaattcctgcagcccgggggatccactagttctagagcggccgccaccgcggtggagctccaattcgccctatagtgagtcgtattacgcgcgctcactggccgtcgttttacaacgtcgtgactgggaaaaccctggcgttacccaacttaatcgccttgcagcacatccccctttcgccagctggcgtaatagcgaagaggcccgcaccgatcgcccttcccaacagttgcgcagcctgaatggcgaatggaaattgtaagcgttaatattttgttaaaattcgcgttaaatttttgttaaatcagctcattttttaaccaataggccgtactgcgatgagtggcagggcggggcgtaatttttttaaggcagttattggtgcccttaaacgcctggttgctacgcctgaataagtgataataagcggatgaatggcagaaattcgaaagcaaattcgacccggtcgtcggttcagggcagggtcgttaaatagccgcttatgtctattgctggtttaccggtttattgactaccggaagcagtgtgaccgtgtgcttctcaaatgcctgaggccagtttgctcaggctctccccgtggaggtaataattgacgatatgatcatttattctgcctcccagagcctgataaaaacggtgaatccgttagcgaggtgccgccggcttccattcaggtcgaggtggcccggctccatgcaccgcgacgcaacgcggggaggcagacaaggtatagggcggcgaggcggctacagccgatagtctggaacagcgcacttacgggttgctgcgcaacccaagtgctaccggcgcggcagcgtgacccgtgtcggcggctccaacggctcgccatcgtccagaaaacacggctcatcgggcatcggcaggcgctgctgcccgcgccgttcccattcctccgtttcggtcaaggctggcaggtctggttccatgcccggaatgccgggctggctgggcggctcctcgccggggccggtcggtagttgctgctcgcccggatacagggtcgggatgcggcgcaggtcgccatgccccaacagcgattcgtcctggtcgtcgtgatcaaccaccacggcggcactgaacaccgacaggcgcaactggtcgcggggctggccccacgccacgcggtcattgaccacgtaggccgacacggtgccggggccgttgagcttcacgacggagatccagcgctcggccaccaagtccttgactgcgtattggaccgtccgcaaagaacgtccgatgagcttggaaagtgtcttctggctgaccaccacggcgttctggtggcccatctgcgccacgaggtgatgcagcagcattgccgccgtgggtttcctcgcaataagcccggcccacgcctcatgcgctttgcgttccgtttgcacccagtgaccgggcttgttcttggcttgaatgccgatttctctggactgcgtggccatgcttatctccatgcggtaggggtgccgcacggttgcggcaccatgcgcaatcagctgcaacttttcggcagcgcgacaacaattatgcgttgcgtaaaagtggcagtcaattacagattttctttaacctacgcaatgagctattgcggggggtgccgcaatgagctgttgcgtaccccccttttttaagttgttgatttttaagtctttcgcatttcgccctatatctagttctttggtgcccaaagaagggcacccctgcggggttcccccacgccttcggcgcggctccccctccggcaaaaagtggcccctccggggcttgttgatcgactgcgcggccttcggccttgcccaaggtggcgctgcccccttggaacccccgcactcgccgccgtgaggctcggggggcaggcgggcgggcttcgcccttcgactgcccccactcgcataggcttgggtcgttccaggcgcgtcaaggccaagccgctgcgcggtcgctgcgcgagccttgacccgccttccacttggtgtccaaccggcaagcgaagcgcgcaggccgcaggccggaggcttttccccagagaaaattaaaaaaattgatggggcaaggccgcaggccgcgcagttggagccggtgggtatgtggtcgaaggctgggtagccggtgggcaatccctgtggtcaagctcgtgggcaggcgcagcctgtccatcagcttgtccagcagggttgtccacgggccgagcgaagcgagccagccggtggccgctcgcggccatcgtccacatatccacgggctggcaagggagcgcagcgaccgcgcagggcgaagcccggagagcaagcccgtagggcgccgcagccgccgtaggcggtcacgactttgcgaagcaaagtctagtgagtatactcaagcattgagtggcccgccggaggcaccgccttgcgctgcccccgtcgagccggttggacaccaaaagggaggggcaggcatggcggcatacgcgatcatgcgatgcaagaagctggcgaaaatgggcaacgtggcggccagtctcaagcacgcctaccgcgagcgcgagacgcccaacgctgacgccagcaggacgccagagaacgagcactgggcggccagcagcaccgatgaagcgatgggccgactgcgcgagttgctgccagagaagcggcgcaaggacgctgtgttggcggtcgagtacgtcatgacggccagcccggaatggtggaagtcggccagccaagaacagcaggcggcgttcttcgagaaggcgcacaagtggctggcggacaagtacggggcggatcgcatcgtgacggccagcatccaccgtgacgaaaccagcccgcacatgaccgcgttcgtggtgccgctgacgcaggacggcaggctgtcggccaaggagttcatcggcaacaaagcgcagatgacccgcgaccagaccacgtttgcggccgctgtggccgatctagggctgcaacggggcatcgagggcagcaaggcacgtcacacgcgcattcaggcgttctacgaggccctggagcggccaccagtgggccacgtcaccatcagcccgcaagcggtcgagccacgcgcctatgcaccgcagggattggccgaaaagctgggaatctcaaagcgcgttgagacgccggaagccgtggccgaccggctgacaaaagcggttcggcaggggtatgagcctgccctacaggccgccgcaggagcgcgtgagatgcgcaagaaggccgatcaagcccaagagacggcccgagaccttcgggagcgcctgaagcccgttctggacgccctggggccgttgaatcgggatatgcaggccaaggccgccgcgatcatcaaggccgtgggcgaaaagctgctgacggaacagcgggaagtccagcgccagaaacaggcccagcgccagcaggaacgcgggcgcgcacatttccccgaaaagtgccacctggattttggtcatgagattatcaaaaaggatcttcacctagatccttttaaattaaaaatgaagttttaaatcaatctaaagtatatatgagtaaacttggtctgacagttaccaatgcttaatcagtgaggcacctatctcagcgatctgtctatttcgttcatccatagttgcctgactccccgtcgtgtagataactacgatacgggagggcttaccatctggccccagtgctgcaatgataccgcgagacccacgctcaccggctccagatttatcagcaataaaccagccagccggaagggccgagcgcagaagtggtcctgcaactttatccgcctccatccagtctattaattgttgccgggaagctagagtaagtagttcgccagttaatagtttgcgcaacgttgttgccattgctacaggcatcgtggtgtcacgctcgtcgtttggtatggcttcattcagctccggttcccaacgatcaaggcgagttacatgatcccccatgttgtgcaaaaaagcggttagctccttcggtcctccgatcgttgtcagaagtaagttggccgcagtgttatcactcatggttatggcagcactgcataattctcttactgtcatgccatccgtaagatgcttttctgtgactggtgagtactcaaccaagtcattctgagaatagtgtatgcggcgaccgagttgctcttgcccggcgtcaatacgggataataccgcgccacatagcagaactttaaaagtgctcatcattggaaaacgttcttcggggcgaaaactctcaaggatcttaccgctgttgagatccagttcgatgtaacccactcgtgcacccaactgatcttcagcatcttttactttcaccagcgtttctgggtgagcaaaaacaggaaggcaaaatgccgcaaaaaagggaataagggcgacacggaaatgttgaatactcatactcttcctttttcaatattattgaagcatttatcagggttattgtctcatgagcggatacatatttgaat

SEQ ID NO: 13 - RNA, 19 nt, synthetic construct
  misc_feature 1..19: note = siMYCN-1 (MYCN siRNA cocktail)
  source 1..19: mol_type = other RNA
cggagatgctgcttgagaa

SEQ ID NO: 14 - RNA, 19 nt, synthetic construct
  misc_feature 1..19: note = siMYCN-2 (MYCN siRNA cocktail)
  source 1..19: mol_type = other RNA
cggagttggtaaagaatga

SEQ ID NO: 15 - RNA, 19 nt, synthetic construct
  misc_feature 1..19: note = siMYCN-3 (MYCN siRNA cocktail)
  source 1..19: mol_type = other RNA
cagcagttgctaaagaaaa

SEQ ID NO: 16 - RNA, 21 nt, synthetic construct
  misc_feature 1..21: note = MYCN siRNA (sense)
  source 1..21: mol_type = other RNA
cagcagttgctaaagaaaatt

SEQ ID NO: 17 - RNA, 21 nt, synthetic construct
  misc_feature 1..21: note = MYCN siRNA (antisense)
  source 1..21: mol_type = other RNA
ttttctttagcaactgctgtt

SEQ ID NO: 18 - RNA, 19 nt, synthetic construct
  misc_feature 1..19: note = MYCN siRNA (exon 2)
  source 1..19: mol_type = other RNA
tgatctgcaagaacccaga

SEQ ID NO: 19 - DNA, 15 bp, synthetic construct
  misc_feature 1..15: note = MYCN ASO
  source 1..15: mol_type = other DNA
aacgttgaggggcat

SEQ ID NO: 20 - RNA, 24 nt, synthetic construct
  misc_feature 1..24: note = RAS miRNA (wild-type sense Syn-miR-143)
  source 1..24: mol_type = other RNA
ggtctctacgtcgtgacgtggagt

SEQ ID NO: 21 - RNA, 24 nt, synthetic construct
  misc_feature 1..24: note = RAS miRNA (wild-type antisense Syn-miR-143)
  source 1..24: mol_type = other RNA
tgagatgaagcactgtagctcagg

SEQ ID NO: 22 - RNA, 24 nt, synthetic construct
  misc_feature 1..24: note = RAS miRNA (F/Ome sense Syn-miR-143)
  source 1..24: mol_type = other RNA
ggtctctacgtcgtgacgtggagt

SEQ ID NO: 23 - RNA, 24 nt, synthetic construct
  misc_feature 1..24: note = RAS miRNA (F/Ome antisense Syn-miR-143)
  modified_base 1: mod_base = OTHER; note = 2'-deoxy-fluoro modified nucleotide
  modified_base 23: mod_base = OTHER; note = t is dT
  source 1..24: mol_type = other RNA
  modified_base 3: mod_base = OTHER; note = 2-deoxy-fluoro modified nucleotide
  modified_base 24: mod_base = OTHER; note = t is dT
  modified_base 5: mod_base = OTHER; note = 2-deoxy-fluoro modified nucleotide
  modified_base 7: mod_base = OTHER; note = 2'-deoxy-fluoro modified nucleotide
  modified_base 9: mod_base = OTHER; note = 2'-deoxy-fluoro modified nucleotide
  modified_base 11: mod_base = OTHER; note = 2'-deoxy-fluoro modified nucleotide
  modified_base 13: mod_base = OTHER; note = 2'-deoxy-fluoro modified nucleotide
  modified_base 17: mod_base = OTHER; note = 2'-deoxy-fluoro modified nucleotide
  modified_base 19: mod_base = OTHER; note = 2'-deoxy-fluoro modified nucleotide
  modified_base 21: mod_base = OTHER; note = 2'-deoxy-fluoro modified nucleotide
  modified_base 23: mod_base = OTHER; note = 2'-deoxy-fluoro modified nucleotide
  modified_base 24: mod_base = OTHER; note = 2'-deoxy-fluoro modified nucleotide
  modified_base 2: mod_base = OTHER; note = 2'-O-methyl modified nucleotide
  modified_base 4: mod_base = OTHER; note = 2'-O-methyl modified nucleotide
  modified_base 6: mod_base = OTHER; note = 2'-O-methyl modified nucleotide
  modified_base 14: mod_base = OTHER; note = 2'-O-methyl modified nucleotide
  modified_base 8: mod_base = OTHER; note = 2'-O-methyl modified nucleotide
  modified_base 10: mod_base = OTHER; note = 2'-O-methyl modified nucleotide
  modified_base 12: mod_base = OTHER; note = 2'-O-methyl modified nucleotide
  modified_base 16: mod_base = OTHER; note = 2'-O-methyl modified nucleotide
  modified_base 18: mod_base = OTHER; note = 2'-O-methyl modified nucleotide
  modified_base 20: mod_base = OTHER; note = 2'-O-methyl modified nucleotide
  modified_base 22: mod_base = OTHER; note = 2'-O-methyl modified nucleotide
  modified_base 15: mod_base = OTHER; note = 2'-deoxy-fluoro modified nucleotide
tgagatgaagcactgtagctcatt

SEQ ID NO: 24 - RNA, 25 nt, synthetic construct
  misc_feature 1..25: note = siR-KRAS
  source 1..25: mol_type = other RNA
aatgcatgacaacactggatgaccg

SEQ ID NO: 25 - RNA, 25 nt, synthetic construct
  misc_feature 1..25: note = siR-HRAS
  source 1..25: mol_type = other RNA
ccatccagctgatccagaaccattt

SEQ ID NO: 26 - RNA, 38 nt, synthetic construct
  misc_feature 1..38: note = RAS siRNA
  source 1..38: mol_type = other RNA
ggactctgaagatgtacctaggtacatcttcagagtcc

SEQ ID NO: 27 - DNA, 17 bp, synthetic construct
  misc_feature 1..17: note = Mutated K-RAS ASO
  source 1..17: mol_type = other DNA
ctacgccacaagctcca

SEQ ID NO: 28 - DNA, 110 bp, Homo sapiens
  misc_feature 1..110: note = MIR34A
  source 1..110: mol_type = other DNA
ggccagctgtgagtgtttctttggcagtgtcttagctggttgttgtgagcaatagtaaggaagcaatcagcaagtatactgccctagaagtgctgcacgttgtggggccc

SEQ ID NO: 29 - RNA, 19 nt, synthetic construct
  misc_feature 1..19: note = BCL2 3p-siRNA (sense)
  source 1..19: mol_type = other RNA
gcatgcggcctctgtttga

SEQ ID NO: 30 - RNA, 19 nt, synthetic construct
  misc_feature 1..19: note = BCL2 3p-siRNA (antisense)
  source 1..19: mol_type = other RNA
cgtacgccggagacaaact

SEQ ID NO: 31 - DNA, 18 bp, synthetic construct
  misc_feature 1..18: note = BCL2 ASO
  source 1..18: mol_type = other DNA
tctcccagcgtgcgccat

SEQ ID NO: 32 - RNA, 21 nt, synthetic construct
  misc_feature 1..21: note = PLK1 siRNA (sense)
  modified_base 4: mod_base = OTHER; note = 2'-O-methyl modified nucleotide
  source 1..21: mol_type = other RNA
  modified_base 10: mod_base = OTHER; note = 2'-O-methyl modified nucleotide
  modified_base 14: mod_base = OTHER; note = 2'-O-methyl modified nucleotide
  modified_base 18: mod_base = OTHER; note = 2'-O-methyl modified nucleotide
agatcaccctccttaaatatt

SEQ ID NO: 33 - RNA, 21 nt, synthetic construct
  misc_feature 1..21: note = PLK1 siRNA (antisense)
  modified_base 8: mod_base = OTHER; note = 2'-O-methyl modified nucleotide
  source 1..21: mol_type = other RNA
  modified_base 17: mod_base = OTHER; note = 2'-O-methyl modified nucleotide
tatttaaggagggtgatcttt

SEQ ID NO: 34 - RNA, 21 nt, synthetic construct
  misc_feature 1..21: note = PLK1 siRNA
  source 1..21: mol_type = other RNA
aagggcggctttgccaagtgc

SEQ ID NO: 35 - DNA, 20 bp, synthetic construct
  misc_feature 1..20: note = PLK1 ASO
  source 1..20: mol_type = other DNA
accagtccggaggggagggc

SEQ ID NO: 36 - RNA, 22 nt, synthetic construct
  misc_feature 1..22: note = Purified siRNA
  modified_base 21: mod_base = OTHER; note = t is dT
  source 1..22: mol_type = other RNA
  modified_base 22: mod_base = OTHER; note = t is dT
ggtgccagttctccaagattnn

SEQ ID NO: 37 - protein, 37 aa, synthetic construct
  REGION 1..37: note = LL-37
LLGDFFRKSKEKIGKEFKRIVQRIKDFLRNLVPRTES

SEQ ID NO: 38 - DNA, 6455 bp, Homo sapiens
  misc_feature 1..6455: note = MYCN
  source 1..6455: mol_type = genomic DNA
aggctgtgacagtcatctgtctggacgcgctgggtggatgcggggggctcctgggaactgtgttggagccgagcaagcgctagccaggcgcaagcgcgcacagactgtagccatccgaggacacccccgcccccccggcccacccggagacacccgcgcagaatcgcctccggatcccctgcagtcggcgggaggtaaggagcagggcttgcaaaccgcccggcgcccagggaagcgacgagcgccggggcaaggcaagccctggacgggattgcgacgtgcgcaccgggcgccctaatatgcccgggggactgtttctgcttccgaaacaaaaccatctctgggttttcccagaaaagccagttccagccccgaaggcatcctggctagaggagacccgccctaatccttttgcagcccttaccggggggagtaatggcttctgcgaaaagaaattccctcggctctagaagatctgtctgtgtttgagctgtcggagagccggtgcgtccccaccccaggctggggttcttctccaaagggtgcccctggaggaagaagagggggggattaggcagggcgaggccgccgcggtcgcaatctgggtcacggctgctccagcttggaggagaggcggctctcccggcgaccctcctcgcgcgggcgcccctgccattcccgggaacaggggctcagcctctccctccctggaagaggacgttgtcgtgggtttggaagagcaggggtgggcttagagagcttccaattaagctattggcaggagtatccctgcagcgggtgaatgccgaggggcgtttgctcaaatttggggaggggaaggatttgtggatatgggtgtctgttgttggtctctgtctagagaaaggcttttttttatttgcaaagttttctaaatcccctgctatcatttgcactcctgaggttgcatttttacaaagggggtagaaggtactccaaataccattcccggtagctgggtcggagagcctggggcttcccctgagcagccggccccacaccgctgcgagtgcggttgtctgcgtgctcgtgagagctagaattctgcagccaggaacagccccctcccccaggcagtgccttgtgtgaatgaaatggcagtttccaaagttgcggagcctcgccaccaccccctgcatctgcatgccccctcccaccccctgtcgtagacagcttgtacacaaaaggagggcgggagggagggagcgagaggcacaacttcctccaccttcgggagcagtgggcagagtggggggcttggagggaagattggggaacctggttagagggggcgcccattgcctatcccctcggtctgccccgtttgcccaccctctccggtgtgtctgtcggttgcagtgttggaggtcggcgccggcccccgccttccgcgccccccacgggaaggaagcacccccggtattaaaacgaacggggcggaaagaagccctcagtcgccggccgggaggcgagccgatgccgagctgctccacgtccaccatgccgggcatgatctgcaagaacccagacctcgagtttgactcgctacagccctgcttctacccggacgaagatgacttctacttcggcggccccgactcgacccccccgggggaggacatctggaagaagtttgagctgctgcccacgcccccgctgtcgcccagccgtggcttcgcggagcacagctccgagcccccgagctgggtcacggagatgctgcttgagaacgagctgtggggcagcccggccgaggaggacgcgttcggcctggggggactgggtggcctcacccccaacccggtcatcctccaggactgcatgtggagcggcttctccgcccgcgagaagctggagcgcgccgtgagcgagaagctgcagcacggccgcgggccgccaaccgccggttccaccgcccagtccccgggagccggcgccgccagccctgcgggtcgcgggcacggcggggctgcgggagccggccgcgccggggccgccctgcccgccgagctcgcccacccggccgccgagtgcgtggatcccgccgtggtcttcccctttcccgtgaacaagcgcgagccagcgcccgtgcccgcagccccggccagtgccccggcggcgggccctgcggtcgcctcgggggcgggtattgccgccccagccggggccccgggggtcgcccctccgcgcccaggcggccgccagaccagcggcggcgaccacaaggccctcagtacctccggagaggacaccctgagcgattcaggtaaagaccgaactcgggtccggctgcctccctggggcactggaccccgggtcgcgtcccctttgttagtgctcgtatgtcttggcctggggagcattttggaggcagtgctaggggcagagaggtcctgtttcccccaagtctctcctcggggtaaagagaaggggctgagagaatgccgttgcaaaaggggtgctctccaattctcgccttcactaaagttccttccaccctctcctggggagccctcctctaggccatcacgggccctcacccggtcccccacctctcttttgcagcgcagtctgaggaataaaattggagaaagttggtggctaaaccgggtgggggtttagggggttgctgggtgcactgcctggacagaaacctgttagcgcaggggtgaaagggactctctggcccaggtcaggggagggaaagacatcccgagaagattcaagggctgtgcaaagccctgtttaaggcgcaggaacttataggagggttgcacagatggctagagccgattttctattctttttctttttctttttttttttttttcaaatgtcggtacctttcccttcccccatcctcggtgggtggtgggctatttgctcctggtgcgtggccagcaggcggcgatatgcgaggccagcaggcgggcccgggatctgaaaggctgggggtggtgggggcaccctccctccctccattcagcagctggctgcaagtgcaacagcagttgtgtacattctcagggggcctcctctttccagtgtgcagtggaaactggctgtagttttgtcttccagcctgaattccaggcctaatttgagatgtgagttgtatctgtaacccagtgcccttgaaggtgagggcaggcactcagcagcctctccaggaaggctcacatcctgggaggactcactgattagttctattgtgttcatttgtctgtgtcttaagctgaagggaagagttaaaaccaagcctttccctgggggtctggatgaacagaactcaacccaaagagtggcattgccttgtccttggagcagggagctgggaccccccttggactttgaaaaccagtgttttcagaatgcaggtggataacaagcctaaatttacttctgggctgaggagagatctttgaggctcctggaaggaaacttggtgataagcctccagtttgaaacggctctgtccctttaatgtctgtgccttgacagcttttggtgaggaagcacttccttccaacagctgtcttcttggcagaaaaccaaaacattggcttaaagggacccacagactggaacagcctcacatttcggctttagaacaaatcccacaattgttcagctttccggtccccttcagatcaagcagaagatatgttttgattttcatgcttgtattttaaacaataattttctaccccagcgtggtagtcaatgaggagagaggggaagaatgcgcacatgatgctacacgtttctgttgttgctgttattattggtggctttgaggagagctgctcccatttgggggtttataccaactgtggattatggctttgtcattaagatttgatctttgttaaatgaaaaactgtttattgtataaaactcaggtttgtggacgaaaagttgttttttttcttcagttaattaaattgttcctcaagtttgtttaaggacttaaaatcaaacacaaccatgtgtaaactgctaaatgaggctcctaaaatgagaggcctcaactctttaagtgtggagctagaaatgtaaataagtccacagggcagactggtgattatgataaaagctaccatttactgagcatctgtctactaggctcagctctatgctaagtctacatgttatctgtcaaagtggtatcatccccatttaatagctgaggaaacagaggcttagaaaggctgggtaacttgaccagggtcatgcaactagtctgcggtggagccaggattctgtctgaccctaaaggccaagttctttatatttatttctaccacctgctaaagtcttgaatggaggctgaaagcacagttggggtatggggaagaaaaatatatatacatacatatatgtatatgtatgtatgtatgtatggggggttgttttgtttttgtttttgataaggagttttgctcttgttgcccaggctggagtgcagtggtatgatctgggctcactgcaacctccgcctcccgggttcaagtcattctcctgcctcagcctcccgagtagctgggattaccggagcatgccaccacacccagcaaagttttgtatttttagtagagacagggtttcaccatgttggccaggctgatcttgaactcctcatctcaggtgatctgcccgcctccgcttcccaaagtgctgggattacaggtgtgagtcaccgcgtccggcctacagatatatttaatttaaagagatctaaaacaaatacaaaactgtccacatctatgttgatggacccataaaaatagcagtctgccagggtctgccggaagagacagataagcatacatattaacatggatatatatgtgaatttcattcaaatggttctcacatgagagtaactagcatctttctctcagatgatgaagatgatgaagaggaagatgaagaggaagaaatcgacgtggtcactgtggagaagcggcgttcctcctccaacaccaaggctgtcaccacattcaccatcactgtgcgtcccaagaacgcagccctgggtcccgggagggctcagtccagcgagctgatcctcaaacgatgccttcccatccaccagcagcacaactatgccgccccctctccctacgtggagagtgaggatgcacccccacagaagaagataaagagcgaggcgtccccacgtccgctcaagagtgtcatccccccaaaggctaagagcttgagcccccgaaactctgactcggaggacagtgagcgtcgcagaaaccacaacatcctggagcgccagcgccgcaacgaccttcggtccagctttctcacgctcagggaccacgtgccggagttggtaaagaatgagaaggccgccaaggtggtcattttgaaaaaggccactgagtatgtccactccctccaggccgaggagcaccagcttttgctggaaaaggaaaaattgcaggcaagacagcagcagttgctaaagaaaattgaacacgctcggacttgctagacgcttctcaaaactggacagtcactgccactttgcacattttgattttttttttaaacaaacattgtgttgacattaagaatgttggtttactttcaaatcggtcccctgtcgagttcggctctgggtgggcagtaggaccaccagtgtggggttctgctgggaccttggagagcctgcatcccaggatgctgggtggccctgcagcctcctccacctcacctccatgacagcgctaaacgttggtgacggttgggagcctctggggctgttgaagtcaccttgtgtgttccaagtttccaaacaacagaaagtcattccttctttttaaaatggtgcttaagttccagcagatgccacataaggggtttgccatttgatacccctggggaacatttctgtaaataccattgacacatccgccttttgtatacatcctgggtaatgagaggtggcttttgcggccagtattagactggaagttcatacctaagtactgtaataatacctcaatgtttgaggagcatgttttgtatacaaatatattgttaatctctgttatgtactgtactaattcttacactgcctgtatactttagtatgacgctgatacataactaaatttgatacttatattttcgtatgaaaatgagttgtgaaagttttgagtagatattactttatcactttttgaactaagaaacttttgtaaagaaatttactatatatatatgcctttttcctagcctgtttcttcctgttaatgtatttgttcatgtttggtgcatagaactgggtaaatgcaaagttctgtgtttaatttcttcaaaatgtatatatttagtgctgcatcttatagcactttgaaatacctcatgtttatgaaaataaatagcttaaaattaaa

SEQ ID NO: 39 - DNA, 3335 bp, Homo sapiens
  misc_feature 1..3335: note = H-RAS
  source 1..3335: mol_type = genomic DNA
aggcccgcccgagtctccgccgcccgtgccctgcgcccgcaacccgagccgcacccgccgcggacggagcccatgcgcggggcgaaccgcgcgcccccgcccccgccccgccccggcctcggccccggccctggccccgggggcagtcgcgcctgtgaacggtgagtgcgggcagggatcggccgggccgcgcgccctcctcgcccccaggcggcagcaatacgcgcggcgcgggccgggggcgcggggccggcgggcgtaagcggcggcggcggcggcggcggcgggtgggtggggccgggcggggcccgcgggcacaggtgagcgggcgtcgggggctgcggcgggcgggggccccttcctccctggggcctgcgggaatccgggccccacccgtggcctcgcgctgggcacggtccccacgccggcgtacccgggagcctcgggcccggcgccctcacacccgggggcgtctgggaggaggcggccgcggccacggcacgcccgggcacccccgattcagcatcacaggtcgcggaccaggccgggggcctcagccccagtgccttttccctctccgggtctcccgcgccgcttctcggccccttcctgtcgctcagtccctgcttcccaggagctcctctgtcttctccagctttctgtggctgaaagatgcccccggttccccgccgggggtgcggggcgctgcccgggtctgccctcccctcggcggcgcctagtacgcagtaggcgctcagcaaatacttgtcggaggcaccagcgccgcggggcctgcaggctggcactagcctgcccgggcacgccgtggcgcgctccgccgtggccagacctgttctggaggacggtaacctcagccctcgggcgcctccctttagcctttctgccgacccagcagcttctaatttgggtgcgtggttgagagcgctcagctgtcagccctgcctttgagggctgggtcccttttcccatcactgggtcattaagagcaagtgggggcgaggcgacagccctcccgcacgctgggttgcagctgcacaggtaggcacgctgcagtccttgctgcctggcgttggggcccagggaccgctgtgggtttgcccttcagatggccctgccagcagctgccctgtggggcctggggctgggcctgggcctggctgagcagggccctccttggcaggtggggcaggagaccctgtaggaggaccccgggccgcaggcccctgaggagcgatgacggaatataagctggtggtggtgggcgccggcggtgtgggcaagagtgcgctgaccatccagctgatccagaaccattttgtggacgaatacgaccccactatagaggtgagcctggcgccgccgtccaggtgccagcagctgctgcgggcgagcccaggacacagccaggatagggctggctgcagcccctggtcccctgcatggtgctgtggccctgtctcctgcttcctctagaggaggggagtccctcgtctcagcaccccaggagaggagggggcatgaggggcatgagaggtaccagggagaggctggctgtgtgaactccccccacggaaggtcctgagggggtccctgagccctgtcctcctgcaggattcctaccggaagcaggtggtcattgatggggagacgtgcctgttggacatcctggataccgccggccaggaggagtacagcgccatgcgggaccagtacatgcgcaccggggagggcttcctgtgtgtgtttgccatcaacaacaccaagtcttttgaggacatccaccagtacaggtgaaccccgtgaggctggcccgggagcccacgccgcacaggtggggccaggccggctgcgtccaggcaggggcctcctgtcctctctgcgcatgtcctggatgccgctgcgcctgcagcccccgtagccagctctcgctttccacctctcagggagcagatcaaacgggtgaaggactcggatgacgtgcccatggtgctggtggggaacaagtgtgacctggctgcacgcactgtggaatctcggcaggctcaggacctcgcccgaagctacggcatcccctacatcgagacctcggccaagacccggcaggtgaggcagctctccaccccacagctagccagggacccgccccgccccgccccagccagggagcagcactcactgaccctctcccttgacacagggcagccgctctggctctagctccagctccgggaccctctgggaccccccgggacccatgtgacccagcggcccctcgcgctgtaagtctcccgggacggcagggcagtgagggaggcgagggccggggtctgggctcacgccctgcagtcctgggccgacacagctccggggaaggcggaggtccttggggagagctgccctgagccaggccggagcggtgaccctggggcccggcccctcttgtccccagagtgtcccacgggcacctgttggttctgagtcttagtggggctactggggacacgggccgtagctgagtcgagagctgggtgcagggtggtcaaaccctggccagacctggagttcaggagggccccgggccaccctgacctttgaggggctgctgtagcatgatgcgggtggccctgggcacttcgagatggccagagtccagcttcccgtgtgtgtggtgggcctggggaagtggctggtggagtcgggagcttcgggccaggcaaggcttgatcccacagcagggagcccctcacccaggcaggcggccacaggccggtccctcctgatcccatccctcctttcccagggagtggaggatgccttctacacgttggtgcgtgagatccggcagcacaagctgcggaagctgaaccctcctgatgagagtggccccggctgcatgagctgcaagtgtgtgctctcctgacgcaggtgagggggactcccagggcggccgccacgcccaccggatgaccccggctccccgcccctgccggtctcctggcctgcggtcagcagcctcccttgtgccccgcccagcacaagctcaggacatggaggtgccggatgcaggaaggaggtgcagacggaaggaggaggaaggaaggacggaagcaaggaaggaaggaagggctgctggagcccagtcaccccgggaccgtgggccgaggtgactgcagaccctcccagggaggctgtgcacagactgtcttgaacatcccaaatgccaccggaaccccagcccttagctcccctcccaggcctctgtgggcccttgtcgggcacagatgggatcacagtaaattattggatggtcttga

SEQ ID NO: 40 - DNA, 12438 bp, Homo sapiens
  misc_feature 1..12438: note = N-RAS
  source 1..12438: mol_type = genomic DNA
gaaacgtcccgtgtgggaggggcgggtctgggtgcggcctgccgcatgactcgtggttcggaggcccacgtggccggggcggggactcaggcgcctggggcgccgactgattacgtagcgggcggggccggaagtgccgctccttggtgggggctgttcatggcggttccggggtctccaacatttttcccggctgtggtcctaaatctgtccaaagcagaggcagtggagcttgaggtaagtttatctcatgcatagtgttcggctttgggctgtggaatgttcaggcgtttcactgatgccagaaatggagcagaatctatcagctggagacaaaggccttgggcgggggtccttccatttggtgcctacgtggggagatctttggagacagaagggagaatgggaaggagttgcggcctggaggcttcctgctagagctgagaagccttcggggagtaataggaagggggatttccattgcttaggctgagggcggggcccaaggactgttgaaaaatagctaaggatgggggttgctagaaaactactccagaagtgtgaggccgatattaatccggtgtttttgcgttctctagtcactttaagaaccaaatggaaggtcacactagggttttcatttccattgattatagaaagctttaaagtactgtagatgtggctcgccaattaaccctgattactggtttccaacaggttcttgctggtgtgaaatgactgagtacaaactggtggtggttggagcaggtggtgttgggaaaagcgcactgacaatccagctaatccagaaccactttgtagatgaatatgatcccaccatagaggtgaggcccagtggtagcccgctgacctgatcctgtctctcacttgtcggatcatctttacccatattctgtattaaaggaataagaggagagaaagtaaaaagttattttgggtatacattcagttatgcaataagcttaacgtgtttatagagaacagttcatttttattagctgctgaagtttctaaaacctgtccagtttttaacagttctgtaaactattgcaaactcagtgttgagttcattcatgagtttcttcatatataacagctctattacatgagaaacacaggccatagtagcgagactgtctgattgtatgggagataataggatggagataaaggattcagagatgagtgttcttcaatatttatttattagctagttgaagcagctgagaccagatgattggagtagcaagaacttgagatttttagtctttatgcctaggattttggtccctgtttgcagtttatttagttgtgtgatattgagcaactgaatctctcccaacctcattttcctcatgttttaaattaccataaacttgtcctgcctaccacacagggatgttatggaaagttaaataatatatttaagttatttatgaatggtaaagcactatgtaatagtacttagggattctattgttattatgagagttcatggtacagattgtcttcagtaagtggcacctaaggctctttaaataaagggttttgccggacacggtggctcacgcctgtaatcccagcactttgggaggctgaggcaggcggatcacaaggtcaggagttcaagaccagcctgatcaacatggtgaaaccccgtctctactaaaaatacaaaaattagctgggtgtggtggcaggcacctgtaatcccagctactcaggaggctgaggcaggagaatcgcttgaaccagaggcagagggtgcagtgagccgagatcacaccacagacctccagcctgggcaacagagcgagacttcgtctcaaaaaataaataaatagataaataaataaagggttttgtaattttgttcagtttagaaatgcctaactttagagattattttaatcaacacctggcctccctaccatctggctactcgtgtttaattgatgaaaactaactctaatgtagccactataaaaaattggttgctaacccttggcaaaatctttattttgagcttaacagctttaatattttacatgaaatgtttaatattttaattaaatatttttaaatgtttgatttattgagcaatttacataagtaaaatacataaattttatgtctacagcccagtgctttttgcgtttctatatagtcatgtagctaccacccagataacagtatagagcacttccagtactccagagagttctccaagtgtgatgacattaaaatacaagtaaaagtcctgttgccataaaaccaaaatgaaagtattttttatatgatctatgcatgtttgtcttcctgagaaattaaacataactataccttgtttggaacctttaagaatttgattcaggaatatttcccaaaggtacatctgtcatgataaaaaaaaaaccttctctgaaacaaaggtatttgtatatttagtcataaacacaaatgatgtatatagggccaggttataattggtggaggtatgtttagatttctttaagtaaaataaacagcacaaataaaacagtccagttcatagcttagtgaaatacactgggtacttaatctgtagcctcctggctgcagtagagttgtcatttgagttactgtgttttcttaatcttttccaggaacacagtgaccatatttcttttctgcaggcatatagaatttggtgggttttcttttatgtagggtgatattggatactttttgtttgtgattatatattagcaatttgagggacaaaccagataggcagaaatgggcttgaatagttagatgcttatttaaccttggcaatagcattgcattccctgtggtttttaataaaaattgaacttccctccctccctgcccccttaccctccacacccccaggattcttacagaaaacaagtggttatagatggtgaaacctgtttgttggacatactggatacagctggacaagaagagtacagtgccatgagagaccaatacatgaggacaggcgaaggcttcctctgtgtatttgccatcaataatagcaagtcatttgcggatattaacctctacaggtactaggagcattattttctctgaaaggatgatctttgtgttctgaatctttatggggaaatgaggttaccacactagggaagatagagctttttaattatgggaagagttggttttaggttgtttgacattgagaatctagggtaattactgaaagttaatactggaatttattttacataatatactgttactataaagtttgataatacataagtgaagcttgctactgggaatgacttggaaccagagttgttgtaattagagatcacgaaggaatttcagagaggaaaacatctccaagaaacatctttcagtatgtaatggaaaagataggccaggcacagtggctcacacctggaatgtcagtgctttgggaggccaaggcgggaggatcactttcagcccaggagttggagaccagcctgggcaacagagcaagaccctgtctctacaaaaataaaaataaaaaaattagtcacacatggtggcagctactcgggaggcagaggtgggaggatcacgtgagctcaggaggtcgaggcatgctcactccactgcactgctgcactccagcctaatcaacagagcaagattctgtctccaaaaaaaataaaaaataaaatgataggagtaagcaaataggaagtccataaagatgaaaacaaagcaagggaacataaagatagactttgtccatagaaccataaagtttcaaagctagattggaccataaaaattctagtacaatattcttattttgcagaatcagaaacagagttcagaatgtcgtttgttaggttttggagtcaggattgttattagtagcagagccaggaccaaaaacccaaagctcctttttcttagcacagtgttcttaaacagaataatataatggttaagaatgagaactctgcctggattgaaacctagctctgtttattagcgacgtgactcaggggctatgtggctttcctaacctataatatggaaataataatacctacctcatagagttgtgaagattacagttttaataaatacgcaaatcactcagaatagtgcctggcacacagtaaatgctacttaagtgttctgcctaaaggcttgagtcttggcttattttctatccatgtgaagatgtctgctctcaaaagcagattggtccaacactgaattcaagtgttcttttcctaacctgttgtacttcccattttttttttgtctaaaagtaatagcagtacttaataaaatgcccacacttggcatgcatctaataaatgttttttgaatttctagaagtcatttttcttctttcttacaagaaatttattcatttttctatatgccttagctcaaaccaaagagtatttaaaacatcttatgaaaatgcatatagtagagcaagataagattaatgaaaaataggcttaagtgagaccaaaaaaataagggtaaaataaacaaatttaggagtgagcatattctgtgattgtgcatgaagttccagtggctttctaaaggtggactacaaatttggtcactgttgtgaaaaggaaagtagccagctgaaagattcagtatctgtatgctgaaagccgttaagttgctcggactagaaggaaattttcccatggatcctcaaagaggcttgtttaatgtaaaaatcagtagtaacctgacagtgacatggtccaggtactttaggctgtcttatcccttaatgtaggctattaccatcaagcacagttttgcaaatagccagtggaatgtagttcagatacatgactttgtgggtaatccaggggtagagactaaaacagtactgtgcagtatgtggttatttacagttaattaagattaaataaaatttaaaaattagttccttgactaccaaatgctcaatagccactagtaggtaccatgttgaacagtacagatatagaccatttccatcatcacataaagtactgttggattgtgttggtcaagacaatctaaagcaattgtttcccaggtgtgctgtgtggtgtgccttacatgtcattgaaaggggtgctgtcaggagttctagatgcttcagcctccctttactaagagcagttcttatgttttctattttatcgcttgggcttccagatacaatgttttgttttaggtttgttttttttgtttgtttgtttttttttttttgagacggagttttgctctggttgcccaagctggatggagtacggtggtgcgatcgcggctcactgcaacctccgcctcccgggttcgagagattctcctgcctcagcttcccgagtagctggaattacaggcgtccaccaccatgcctgactaattttttttgtatttttagtagacttggggtttcaccatgttggccgggctggtttcaaactcctgacctcaggtgatccacccgcctcggcctcccagagggctgggattacaggtgtgaaccaccgtgcccggcctgttttagttttttagagatggagtctccctctgttgcccaagccagagtgcggtggcatgacactctcagggttcaacctctcagggatcaagggatcctcccacctcagcttcctgagtagctggaaccacaggcacatgtgccaccatgcccagctaatttttgtattttttgtagaagcaaggtttcaccatgttgcccaggctggtctcggactcctaggtcaagtgatcctcccacctcaatctcctagagtgctaagactataggcgggagtcaccatgcccagcttcatctacaatttatttgaagaaaatgtttgagcaccacccatcttgaaaagtgatagactgccttccattaaatactgtcacacctagttatttagcagcagtgagcttcactttttatactttagaccttaatctaaagggtgatttctagttgccagttaaatccagagccaagctctttggagaatccaggagcctcactaggtcatgtatcaggataaaatacccatccactcccattagaaggtgagcttgtacttatggcttcctgatggctgctgcaacaagtctaaagcagtctccttagtatacaatgtcttctctaagtggtagaaaaaagcaaaaatactacaagttaatagggctacataaaatttgctagtttcttttttgccctagccatttattccttcctgaaatcttgtctctctctcgctctctctttctctcgctctcactttctttctctttttcttttctcttttcttttctttcttccctttcttttctttcttttttcctgttgcccaggctggagtgcagtggaacaattatggctcactgcagccttgacctttctggacccaggtgatcctcccacctcagtctcccaattagctgggactacaggcatgcgccaccacacccagctataatatatattgtatatatattttttatttataaatatatataaatatatatttatatgtgtaaattatatatatttatatattataaattatatataaatatatatttatatataatatatataatatatatttatttttatatattttatatatattttttggggggggttgggggggatggagtctcactctgtcgcccaggctagagtgtagtggcgtgatcttggctcactgcaatcttcgcctcccaggttcaagcgattctcctgcctcagcttcccgagtagctgggactataggcgcctgccaccacacctggctaatttttgtatttttagtagagatggggtttcaccatattggccaggctggtcttcaactcctgaccttgtgatctgcccacctcaacctcccaaagtgctgggaatacaggcatgagccactgcacccagcctaatctttgtatttttttgtagagaccgggttttgccatgttgcccaggctaatctcaaactcctgggttcaagcagtctgccctcctcagcctcccaaagtgctgagattgcaggcatgagccactgtacccagcctaatcttgtttttcttatgttctgataatatattcccgtttttagggagcagattaagcgagtaaaagactcggatgatgtacctatggtgctagtgggaaacaagtgtgatttgccaacaaggacagttgatacaaaacaagcccacgaactggccaagagttacgggattccattcattgaaacctcagccaagaccagacaggtatggtacagctttcagcatttgtgcaagagtttgcatcagttgattaactctggtagagatgtgatccatattcatattctttgttgttatgcatttttttcatttttatttttttattttttatttttttttaggcagagtctcactctatcttctaagctggagtgcagtggtgtgatctcagctcactgcagcctctgtctcttgggttcaagtgattctcctgcctcagcctcccaagtagctgggactacgggcacatcatcatgcccggctaatttttgtacttttagtagagacagggttttaccatgttgcccaggctggtctcgaactcctggcctcaagcaatcctcccacctgggcctcccagagtgctgggattacaggtgtgagccaccacgcccagcctgttgttaggcatttttagtagtgttctttttcttaacgcttgtttaaacccaaaatgaacttactaatattctgttatggcatgtttactcctgcattaacatccacaaatatttcttgggaagatccttgactaaaaatatttataaacattagttatttctctgtcaacaccagcccgtttatggcttaagcctcctgaatggagtctttagtttaatgtagttttgttccgtgtttctcacattacccttttcctttgcatgaatgtttatttggcaaaatgtgccatttttatatcagcctgttcttgtgattcaataggaatgtgaaatttagtgttctcttccttaaatcaccatattttattttatcagctattcgtttagtaattggaatcttatgtccacataaagagatacaaatgcaagagagcttataatttggattgtgtccgttgagctagctctctcattttttttcattttttccttttatagggtgttgaagatgctttttacacactggtaagagaaatacgccagtaccgaatgaaaaaactcaacagcagtgatgatgggactcagggttgtatgggattgccatgtgtggtgatgtaacaaggtgagcatatggtttcttggcataattacaaatcttagtatatagtattgggcaatttggaggagtgctggtgttattgtctatatgttttttgagtttctgcctatcctcttctgcacattttccatatgacaccctttctgaaagtactgaggtctaaagtgtttaaaacatttgattattccacaggtatctttatatttttggtaacattagaaattataagacattatttatgaaatgtaggcataccctattcctggcaatgaccaggaatttgaaggatcactactttgaaactagttaataaggacatggtttctgttctttttttacagatacttttaaagttttgtcagaaaagagccactttcaaggtaggacaagtttggaaatgtattctcattcctgttaattttgtatatttgtttttcttatactctgaatgtgtcacttatacaaattctgtttctatttcagctgcactgacaccctggtcctgacttccctggaggagaagtattcctgttgctgtcttcagtctcacagagaagctcctgctacttccccagctctcagtagtttagtacaataatctctatttgagaagttctcagaataactacctcctcacttggctgtctgaccagagaatgcacctcttgttactccctgttatttttctgccctgggttcttccacagcacaaacacacctctgccaccccaggtttttcatctgaaaagcagttcatgtctgaaacagagaaccaaaccgcaaacgtgaaattctattgaaaacagtgtcttgagctctaaagtagcaactgctggtgattttttttttctttttactgttgaacttagaactatgctaatttttggagaaatgtcataaattactgttttgccaagaatatagttattattgctgtttggtttgtttataatgttatcggctctattctctaaactggcatctgctctagattcataaatacaaaaatgaatactgaattttgagtctatcctagtcttcacaactttgacgtaattaaatccaactttcacagtgaagtgcctttttcctagaagtggtttgtagacttcctttataatatttcagtggaatagatgtctcaaaaatccttatgcatgaaatgaatgtctgagatacgtctgtgacttatctaccattgaaggaaagctatatctatttgagagcagatgccattttgtacatgtatgaaattggttttccagaggcctgttttggggctttcccaggagaaagatgaaactgaaagcacatgaataatttcacttaataatttttacctaatctccacttttttcataggttactacctatacaatgtatgtaatttgtttcccctagcttactgataaacctaatattcaatgaacttccatttgtattcaaatttgtgtcataccagaaagctctacatttgcagatgttcaaatattgtaaaactttggtgcattgttatttaatagctgtgatcagtgattttcaaacctcaaatatagtatattaacaaattacattttcactgtatatcatggtatcttaatgatgtatataattgccttcaatccccttctcaccccaccctctacagcttcccccacagcaataggggcttgattatttcagttgagtaaagcatggtgctaatggaccagggtcacagtttcaaaacttgaacaatccagttagcatcacagagaaagaaattcttctgcatttgctcattgcaccagtaactccagctagtaattttgctaggtagctgcagttagccctgcaaggaaagaagaggtcagttagcacaaaccctttaccatgactggaaaactcagtatcacgtatttaaacatttttttttcttttagccatgtagaaactctaaattaagccaatattctcatttgagaatgaggatgtctcagctgagaaacgttttaaattctctttattcataatgttctttgaagggtttaaaacaagatgttgataaatctaagctgatgagtttgctcaaaacaggaagttgaaattgttgagacaggaatggaaaatataattaattgatacctatgaggatttggaggcttggcattttaatttgcagataataccctggtaattctcatgaaaaatagacttggataacttttgataaaagactaattccaaaatggccactttgttcctgtctttaatatctaaatacttactgaggtcctccatcttctatattatgaattttcatttattaagcaaatgtcatattaccttgaaattcagaagagaagaaacatatactgtgtccagagtataatgaacctgcagagttgtgcttcttactgctaattctgggagctttcacagtactgtcatcatttgtaaatggaaattctgcttttctgtttctgctccttctggagcagtgctactctgtaattttcctgaggcttatcacctcagtcatttcttttttaaatgtctgtgactggcagtgattctttttcttaaaaatctattaaatttgatgtcaaattagggagaaagatagttactcatcttgggctcttgtgccaatagcccttgtatgtatgtacttagagttttccaagtatgttctaagcacagaagtttctaaatggggccaaaattcagacttgagtatgttctttgaataccttaagaagttacaattagccgggcatggtggcccgtgcctgtagtcccagctacttgagaggctgaggcaggagaatcacttcaacccaggaggtggaggttacagtgagcagagatcgtgccactgcactccagcctgggtgacaagagagacttgtctccaaaaaaaaagttacacctaggtgtgaattttggcacaaaggagtgacaaacttatagttaaaagctgaataacttcagtgtggtataaaacgtggtttttaggctatgtttgtgattgctgaaaagaattctagtttacctcaaaatccttctctttccccaaattaagtgcctggccagctgtcataaattacatattccttttggtttttttaaaggttacatgttcaagagtgaaaataagatgttctgtctgaaggctaccatgccggatctgtaaatgaacctgttaaatgctgtatttgctccaacggcttactatagaatgttacttaatacaatatcatacttattacaatttttactataggagtgtaataggtaaaattaatctctattttagtgggcccatgtttagtctttcaccatcctttaaactgctgtgaatttttttgtcatgacttgaaagcaaggatagagaaacactttagagatatgtggggtttttttaccattccagagcttgtgagcataatcatatttgctttatatttatagtcatgaactcctaagttggcagctacaaccaagaaccaaaaaatggtgcgttctgcttcttgtaattcatctctgctaataaattataagaagcaaggaaaattagggaaaatattttatttggatggtttctataaacaagggactataattcttgtacattatttttcatctttgctgtttctttgagcagtctaatgtgccacacaattatctaaggtatttgttttctataagaattgttttaaaagtattcttgttaccagagtagttgtattatatttcaaaacgtaagatgatttttaaaagcctgagtactgacctaagatggaattgtatgaactctgctctggagggaggggaggatgtccgtggaagttgtaagacttttatttttttgtgccatcaaatataggtaaaaataattgtgcaattctgctgtttaaacaggaactattggcctccttggccctaaatggaagggccgatattttaagttgattattttattgtaaattaatccaacctagttctttttaatttggttgaatgttttttcttgttaaatgatgtttaaaaaataaaaactggaagttcttggcttagtcataattcttatattca

SEQ ID NO: 41 - DNA, 45684 bp, Homo sapiens
  misc_feature 1..45684: note = K-RAS
  source 1..45684: mol_type = genomic DNA
ctaggcggcggccgcggcggcggaggcagcagcggcggcggcagtggcggcggcgaaggtggcggcggctcggccagtactcccggcccccgccatttcggactgggagcgagcgcggcgcaggcactgaaggcggcggcggggccagaggctcagcggctcccaggtgcgggagagaggtacggagcggaccacccctcctgggcccctgcccgggtcccgaccctctttgccggcgccgggcggggccggcggcgagtgaatgaattaggggtccccggaggggcgggtggggggcgcgggcgcggggtcggggcgggctgggtgagaggggtctgcaggggggaggcgcgcggacgcggcggcgcggggagtgaggaatgggcggtgcggggctgaggagggtgaggctggaggcggtcgccgctggtgctgcttcctggacggggaaccccttccttcctcctccccgagagccgcggctggaggcttctggggagaaactcgggccgggccggctgcccctcggagcggtggggtgcggtggaggttactcccgcggcgccccggcctcccctccccctctccccgctcccgcacctcttgcctccctttccagcactcggctgcctcggtccagccttccctgctgcatttggcatctctaggacgaaggtataaacttctccctcgagcgcaggctggacggatagtggtccttttccgtgtgtaggggatgtgtgagtaagaggggaggtcacgttttggaagagcataggaaagtgcttagagaccactgtttgaggttattgtgtttggaaaaaaatgcatctgcctccgagttcctgaatgctcccctcccccatgtatgggctgtgacattgctgtggccacaaaggaggaggtggaggtagagatggtggaagaacaggtggccaacaccctacacgtagagcctgtgacctacagtgaaaaggaaaaagttaatcccagatggtctgttttgcttggtcaagttaaacccgaagaaaacccgcagagcagaagcaaggctttttccttgctagttgagtgtagacagcaatagcaaaaatagtacttgaagtttaatttacctgttcttgtcctttcccctatttcttatgtattaccctcatcccctcgtctcttttatactaccctcattttgcagatgtgttctacatctcaagagttattacagtactccaaaacagcacttacatgattttttaaacttacagaggaattgtagcaatccaccagctaaccgcctgaaatagacttaaacatgtgcatctcctttttttttttttttttgagacacagtctcgctctgttgcccaggctggagtgcaatggcgcggtatcggctcactgaaacctccgcctcctgggttcaagcaattctcctgcctcagcctcccgagtagctgggactagtaggtgcacgccaccatgcccagctaatttttgtatttttagtagagacagagtttcatcatgttggtcaggatggtctccatctgctctgttgcccaggctggagtgcagtggcgccgtctcggctcactgcaacctctgcctcctgcattcaagcaattctcctgcctcagcctcccgaataactgggattacaggtgtctgctgccatgcccggctaattttttgtatttttagtagagacgggggtttcaccatgttggtcaggctggtctagaactcctgacctcgtgatctgcccgcctcggcctcccacagtggcatgtgcatcttatagctgaagtctaagccttcttaaatcttgagatccatcaaaacagacaggttttctaattgttatacaatgtatatgttatgtttataatagaaatcattttacaaataagttataaatgggaaaggtctatttgtaattatcagctcagaattaaccataaaactggtgtcactgaagtgactgaggtccaaaatgctgactctgcatgttatagactacagatatcaaatatggttgctaacaatagtttactttgagactgtagccatccacagtatatttgcttttaagagatggtagatggtaattcagttttatgaaaaataaaaatgaattttcttccattacaaaattgttggattcgagtccagtccactccttactagcttttctaactctcggtgagggatcccctcccagcccatgatcttcatttggtaagactcctttggaacccagttctctctagtggatttaaatgtgatttggttttaaaaatctcattcaaggaattttttttttttctggaaacaaccaccgcataaacaagtaaaccggaagatacatgtggctctgaattcatatatatacacaaactctaatccaatgtctgtccacagtatttcctaggctagtaaactttttggccttaacgacccctctaccctctttgtttttttgagagagagagtctcactctgtcacccaggccggaatgcagtggcgcgatctcggcccgctactacctccgactctcaggctcaagcgattctcccgcctcagcttcccgagtagccgggattacaggctcccgccaccgggctaattgtatttttagatacgggatttcaccatgttggccaggctggtctcgacctcctgacctcaggtgatccgcccgcctaagcctcccaaagtgctgggattacaggccaccacacccggcctacactcttaaaaattatcgaaggggccgggcacattggctcttatctgtaatcccagcactttgggagactgaggcgggaggatcgcttgaggccaggagttggagaccagcgtactcaacatagtgagaccttgttataaagaaaaaaaaaatccaggattaaaaaaaatctttgatttgtttgggatttattaatatttaccgtattggaaattaaaacaattttttaaaatgtattcatttaaaaataataagcccattacttggtaacatgaataaaatattttatgaaaaataactattttccaaaacaaaaccaaaacttagaaaagtggtattgtttcacacttcagtaaatctctttaatgatgtggcttaatagaagatatggattcttatatctgcatctgcattcaatctattatgatcacacatctggaaaacttgtgaaagaatgggagttaaaagggtaaaggacatcttaatgttattatgaaaacagttttgacctcttgcacaccagaaaagtcttagtaacctgaggggttcctagaccacattttgagaactgttttaggctatgcaaactggttggggggaggttggggtaggcagagagctagaagatacattttagtgtaattctcctcatctattcctaattgctttggcctacatttgaaataaagcgtggaggcaaacgggataagatacatgtttgtagtggttgttaacttcaccctagacaagcagccaataagtctaggtagagcagagtaaggcggggaactatgccgtgaccgtgtgtgatacaatttttctagcctgtggtgctttttgcggcagggcttaggagtaaggttagtatgttatcatttgggaaaccaaattattattttgggtcttcagtcaattatgatgctgtgtatatttagtgtttatctacaatatatgcacattcattaatttggagctactcatcctataataaatagttgtgcatttactcccatttttttctgcatttctctccttatttataattatgtgttacatgagggaaaggaggtgaaattaaacattcatattatttcaaaaaatttgaaacaactaactaaaaaatatgttttattttctgtatggtgtttgttatacaatctgtcaatattcatgcacctcttgggagacagtgtatgaaaagcaaagagtaacagtcacatggattactgattactgagatatattcacttgcatctttttttttttttgagacggagtggctctgtcgcccaggctggagtgcagtggcgtgatctcggctcactgcaagctccgcctcctgggttcacgccattcttctgcctcagcctcccaagtagctgggactacaggcgcccgccaccacgcccggctaatttttttatatttttagtagagacggggtttcaccgggttagccaggatggtcttgatctcctgacctcgtgatccaccctcctcggcctcccaaagtgctaggattataggcgtgagccaccgtgcccggctcacttgcatctcttaacagctgttttcttactaaaaacagtgtttatctctaatctttttgtttgtttgtttgttttgagatggagtcttactccgtcacccaatctggagtgcagtggcgtgatctgggctcactgcaacctctgcctcccgggttcaagtgattctccttcctcagcctccccagtagctaggactacaggagagcgccaccacgcctgattaatttttgtatttttagtagagagagggtttcaccatattggccaggctggtcttgaactcctggcctcaggtgatccacccgccttggcctctgaaagtgctgggattacaggcatgagccgccgcacccggctttctaatctttatctttttttgtgcagcggtgatacaggattatgtattgtactgaacagttaattcggagttctcttggtttttagctttattttccccagagatttttttttttttttttttttttgagacggagtcttgctctatcgccaggctggagtgcagtggcgccatctcggctcattgcaacctcggactcctattttccccagagatatttcacacattaaaatgtcgtcaaatattgttcttctttgcctcagtgtttaaatttttatttccccatgacacaatccagctttatttgacactcattctctcaactctcatctgattcttactgttaatatttatccaagagaactactgccatgatgctttaaaagtttttctgtagctgttgcatattgacttctaacacttagaggtgggggtccactaggaaaactgtaacaataagagtggagatagctgtcagcaacttttgtgagggtgtgctacagggtgtagagcactgtgaagtctctacatgagtgaagtcatgatatgatcctttgagagcctttagccgccgcagaacagcagtctggctatttagatagaacaacttgattttaagataaaagaactgtctatgtagcatttatgcatttttcttaagcgtcgatggaggagtttgtaaatgaagtacagttcattacgatacacgtctgcagtcaactggaattttcatgattgaattttgtaaggtattttgaaataatttttcatataaaggtgagtttgtattaaaaggtactggtggagtatttgatagtgtattaaccttatgtgtgacatgttctaatatagtcacattttcattatttttattataaggcctgctgaaaatgactgaatataaacttgtggtagttggagctggtggcgtaggcaagagtgccttgacgatacagctaattcagaatcattttgtggacgaatatgatccaacaatagaggtaaatcttgttttaatatgcatattactggtgcaggaccattctttgatacagataaaggtttctctgaccattttcatgagtacttattacaagataattatgctgaaagttaagttatctgaaatgtaccttgggtttcaagttatatgtaaccattaatatgggaactttactttccttgggagtatgtcagggtccatgatgttcactctctgtgcattttgattggaagtgtatttcagagtttcgtgagagggtagaaatttgtatcctatctggacctaaaagacaatctttttattgtaacttttatttttatgggtttcttggtattgtgacatcatatgtaaaggttagatttaattgtactagtgaaatataattgtttgatggttgatttttttaaacttcatcagcagtattttcctatcttcttctcaacattagagaacctacaactaccggataaattttacaaaatgaattatttgcctaaggtgtggtttatataaaggtactattaccaactttacctttgctttgttgtcatttttaaatttactcaaggaaatactaggatttaaaaaaaaattccttgagtaaatttaaattgttatcatgtttttgaggattattttcagatttttttagtttaatgaaaatttaccaaagtaaagaccagcagcagaatgataagtaaagacctgtaagacaccttgaaggtcatggagtagaacttccatcccaagcagatgaggatttatttaatctcaaagacctccaggaggggacattccccaactgtccttgttaactcattttcagaacatatttattagcatattttacatgtaatttggatcttcatgttaaatttaacatcagtggagatggaaaataagcatatcgccttgtctttgaaatagccctatattgttagattgtttcttaggcttctttaccctgggttaagcagtcctaatactttagcatttattctacatctagtgtactaatttaaaaaaatcagttctgaaaaatttctaagaactttcttcaagttccaagctgtgaaatctagaacaggtcaaagtgccttattaacgtactgtactgtgtagtgtcttgaagagacactttgcgctgaggcaagttctgagggcattgggtggccttgggaagatatttatgcagtttagaacctggagaattgattagataactaatcataaggaaacgtcacatatttttggtactataaaaaagtggagaaataatgcctatttgcaaagatttgatttaaacatagaaacaactttatttggcttccaattttaagaatttacagcagtaaaggggaacagtctaattgaagtagactgcctatgcaatagtctctgtatatttacttttgacaagttaattcaatgtgtactatagttttgtttctttgaagaggtttgaatagtgcacccattttaatctgtattgcaaattcagggttacttggcagactctactatttaaatcagatgtaaaaggaagttttaatataattcactttatgcctgaaagttttcctgggattttggaaggtgattttactggaaatgctgtctgtcttccctgaaaatctgagaaattccattacactttgtttccaatcagaggtcatgagtgctatatgagtatatacagcatgacgtcatgaatgtgataaagtgggttaggaaaccttttgctaatgattgttaaaatgcaatataaatgttgaagaaataaagctaacagttaagcctttatttgggcggaaggctgaaaaagtttataaacttaaacctataactctgcttatgatttctgccaaaccagaagacttgactctgggaagcattggttacctgtgaactttgaaactgacggtccctgacgtagtttagtcacctgggaaaaggtatctgagattatctcttatctcccaagttacagtgagtctctgagggaactgacacattacattaagttcttggtgtagttaaactgtaagaaaggcaggagaacttagtagttaaatagttggttaaatggaaatgctgactccatgttattgtaaaaagttaaaaatttaggaggatatggggatttcactgccattgcaggttttgattggtatttaccaatccgtgtgggtcagagagaaaattagaaaggatatgactgcacattttggaattattagcagtttttctacatttaaaatggaaataaattttttaaaaatttaaatcaagtaatactgtattttttggtgatttagatttttcaaaatttacactaagagatagtaaggagggtggctattgtttctttcaataatgtctctgagaggttgtaactcatctaaggatacgtagctaataagtggtaggatttcaatttaaattctctgagaccaagttaagtagaatttgcactgtactcttgtataactttttaaaactgaaaattagctatctttcaaattaagaaaatatttactaatggagactaattcagatttgtaagtataccaaaatttgaacttagcctgctatctaatggcaacttagtggcagaggtatgatgtaaaatcattcaggtatgacacatagatggagtatgtttgtattcgaggctgtgcacataatcacctttacttgtattgtgaagtatatattgttatcttttatgaagcccactaaagagataatgaaatacctcgttattagggcaagattattgaaaactcaaaatagcccccaaacacaatacttggctagaaatatatacctttatagttcagagatcatttattatcaaaaccctgaagttttttttctaaggtaaaatttggtggaagaggaaaagtctcgttttaaaaaaatgtaggtagttacagagatcagaatgattagttgatcacttaccaaatatatattaagtatctactgtatataatatgctagtaagaataaatatagcaggaagtattttttcccaggctctaattgtttgacatcagcatgcttttattgtggcacttataattcagttcaagtattatgcccctctttgatggaacagtttcctattcagtaaggaagaccagattaatcattggattggtttgtttcatctttagtgttctgagctgtagagtatttatttaccaaggtttattttaatttttattttatttttatttttccatgttcattgtagaattcattttacctacgaatgaagtatgtagattatagagagaaaatttgtaaaattaaactgatactgaagactggtataagaaaagccttatgtaatttgtaagctgctattcttctgagtttatacatatatctttagtaatcaatgagggatggttgggtgactgccctccaggggacatttggcaacatctggagatgtttttggttgccacaacttggggagagagtactgctactggcatctattgagtagatgctattactttaaatggcaaagctgcagttacctttgcaccaacctaatattaaacttcctgcagtgcacgggaaagcccccacaacagggttatctgaccccaaacctcaatggtgttaagatccaaaccttgatatgttaacctgtagctttaaacatcctttaaattgtcaaattcatgtccctgacataaggtttatgttagattttcaagtataacaaagatttaaactttaacttttgtacgttaatgatatgttagcttactccagtcttctattaaaacattctgtttttaaaatcagagacacacagcaattttataaatcatttctcttcaaggctgtgaagctctccccacttttgtgagtgccctctactggtcaaattatttgctttataacaagtaacagtgaaatcctaagtttgtgtagtttcgctgtttaaattatgggtggcatcaatttataaatatattcgttttatttaaaagtcttatatgattgatttcgtatcatttttgctctctgctaatattaatataaagattactgtctgtattagttaggcctaactaagtaggtgagtatagtgaactaagaaaggaaacgaggcagtatataagaaaatagggtggttcagttgttaacacttactgagcttactttgttgaagggactaaaaggcagcagtgtggctctctgagcttctttgcatgcactcaggagctgcttaatggagtccaaggcttggtggtgtgttacaggggatgataggagggtcctattcagaagtggcaaattgtgaaagtgcacattttgtagagttttataggactgtagaatagttgtgagcacctgatttttagaataaacagaaaactcaggtactgtatttaggtcaaattaagaataagtatttattaagacctgaatataaaactttactggtcatggtttttttctaccttgggtttttataaatccaaagatttaaaaacatacaaatggaagttggtaatggaattaagtgaaaggaaaaaatgattttatggtttggaatctcctaagattctggttttaacaatacaactaattccttaatcctagaaatgttcttcactgcccactttgtaccatgcagtcttcctgtgggctagagatacactgaggcgcaaaacagaccagattcctgccttcatggagcttattagttttaggtatctctagatttcttgtaatacctattacaatgcctgcacatcagttcattcatgtgggttcaacgtagtactcagtacatggcaaattcaagttttacttttcggaacttcatggatttttttcctcagaatatcttttatccataattggttgaatctgtagatgcagtacccatggatatggatggcccactttattttgaagagcagtgtttctaggcaatcatgctaattatatatgacttaatttagaggctttatacttaagagcattacatttctggcgtctcttaaccattattatttcataatgtgtaggttatggaacagttaaattattgggatcttaatatagaaattagtagaaataagccagatatggtggctcatgcctgtaatcttagcactttgggaggctgaggctattcgctgtactattttttactacttttctataggtttgaaattttttcaaaataaaacattgaaaaaagtaaggtaggtagtgtgtccctccttaatcctttcaaatattttattttcactatttctattaatttttttttttgtttttgagatggagtctcgctctgttgcccaggctggagtgcagtggcgcgatcttggctcactgcagcctccacctcctgggttccagccattctcctgcctcagcctcctgggtagctggtattacaggcatgcaccaccacacccaattactttttgtatttttagtagagacggggtttcaccatgttggccaggctagtctcgaactcctgacctcgtgatctgcccgcctcagcagtgtcactgcttctagaccgttttcaaggcacagagcttagaaatgcatgttactaagaaatcaagagttaactatttttcaccttctttctcccgcagtgagaaccctggttctaccctgtttctccttgtgtaaattttaatgctaaactatacacttgtgaaataaaaatgataatgtcattcttaaattatggatcttgcagtgttatctaagtaacatagattgagtgatttaactttaggtttccttatttgtggaatttggataaatatttttcacccttgagaaaagtgagactcctttctcatcatcagagtatccttaaaccattaaggcaaacatttgggaaaaaactgagctatctggctgcataaaaattaagttttctttaacaaagatagaagacaaatgaaaacctagaaaaaccatttggttcaagtaacaggaagctatcttatatatgaattagagaaaagcaaacacacaaatagaaaaaaagggatggggggtactaaagatataaatagcttgtctaccaaaaaagaaataaaataaataacatgaacatataaaaagacacttacttcatgaatgtgatgcaagttcaaacaataaataacatttctgtactttcatattggctaaggttaaaatgataactgctaggaagggtatggagaagtgtgcgccttgcactgtagtgggagtatagaccctcagactttatggaggtcagtctggaaatatgtttcaaaatgtaaactacatgtcctttgaccaggtaattcaacttcttgaaatttatccaaggatttaattggataaatgtttaagatgtatatataagaatgtttactgcagtgttgtttatgattttaaaaaaatggaaatcatcttcatgtctaccaatagagaatgggtgaataaattatggtatgtccatatatacaaattacatagttgttggaaatattaggtagatttagatatactgatgttcaaaaatgtccattatgtaagtgaagctgggtcacagcaccttgtgttgagtatgatttcatctagaaacaaaattactccctcatcctttgttgtgttttagttttttaaaataagcttataccattgggctgggggaaaagtaaatactcgttttggagagagaaaagggcactaaagtttcagataccgttagattatttcatgcttatttttcaagcctcaataaattacataattcacatgtagtcttggattaaggaaattgctattaaggctaaataaataatatgagaggtatataatataaaatatgaacattatattggcattaagattggatccacggtcattccagcctctcattcttacctggacttcaagtgatcacttgtgggcaaatgccatctgacttgaacaggttacacatgtatgctcattatatcgttattttcaaaatttgtcatataaattttccttgagttcattcagatttttgaactagttttttctcttgggagtagtacacacttaattctctctagtactaagctaatgttcaccattcttataattttaagtatccagcatttagtaaagaagtctttgttttctttatccttacttttagtgaatgtcttagtttttaattgaaaattctgccatgaaaataagctctttaacatcttcactccctaatcaaaacagaaatccttcatagccttcagttgtagctatccttccctgtgatttgtccagctccattatatttattttgaaatatggtgaccagttttgcaaaattatttcaactgtaggtgcccagtgattttgtaaggagaagatactgtttctgaacagttctcagtagccagtggcctgcccctactttttggcctgcgtgtagtatataaaataatgcagttaactttttatagcacttttcattttataaagagattttcatggtctttaatattaatctatgtataaagtcctgtatgcagttttacctactttcacagctgaaggaacaatagcttagagaagatgtgagataaagtagtttgcccaagcccatagcacaaataagtgaagttcttcggctgtccatggatcgaagactcccaagtctatctctagcctggacttctgtcctgagcaccagacatgtatgtatatcaagatgcctgcaggtcatatccaccaggacaacccatgagtacagggaattcaacatgcccaatatcactcatcttttccttcgccctcccctttgtactcatcccctgtcggtaagctctgttattttaaaaaattgaaatgtattcacatagcatacaatttacacttttcaagtgtacatggtttttagtatattcacaagggttgtgcagtcattactactaattccagaatgttattatcaccccaaaagtcccacatccattagcagccactccccaatcccttctcccaccagcctctaaaaactgctaatttttccatctctgtggatttgtccactctgattatttcatataaagagaatcgtacagacgtggccttttgtgtctggcatcctccacacaggatgatattttcagagttcgtctatgtttttgcttgttgatcattccttcattcctttttctggctgaataatactctgttatatggatataccttattttgtttatctgttcatttgatgggcatttgagtgatttcctctttttggcaattttgaataatgccactataaacatttatgtacacgtttttgtgtgaccatatgttttcacttctctcgggtgtatatctaaggtacagttgctgggttatatggtagctctgtctttgactttttgaggaactgccaagtggttttggtagtgattgtactgtttacattcctaccaacaattttacctaagtatttctcaaatctatttaatcttttcggtccatactgctgttgctgccttagttcagattttgtcatttcttgtaataattcgtagctcatctcccagtctctgctcccctctctccctccctcccccttcttctctctcttatttccacccatttttaacatttatagaagtcaaaagtctagttcagaaagcagaaaccatactagatatttcagcacagagaactaattaggtgttggaagactgaaaggcaaaaaaacactgaagtaacacagtaacatcaagaatgggcactactcctaagattcagggaatgctgggaagatttggggtttatcagaactggaagctcagaggaggggccccttgtcgctgaggcttaatccctgcagaggtgcctttggctgctactggtgaatctgagtgggtatgatgagtcagtgtctgggaagggccaaaacattttgtccctttctataatttgtcatgataatgctagtaatgaatctgatctcccttcctattttaaaaaccttttagtgattttgtataggatgaagtttaaaactccttacttaatatacacatgaccctccgtaagctggcccctgcttgattgtccagtttcacttcttggtgcttattctaaggcctctaagccttagagatcctctaagcctttgagatccccaaaccctggactgcggactggtacccacctgtgtggcctgtgaggaactgggctgcacagccggaaggaggtgagcattacttgccttagctcctgtcagatcggcagcattagattctaataggagcgtgaaccgtgttgtgaactgcccatgcaaggatctaggttgcatactccttaggagaatctaactaatgcttgatggtctgaggtgaaacagtttcatcctgaaatcacccccaactcggtccttggaaaaattgtcttccacgaaactggtccctgatgccggaaaagttggggaccgctgttctaagctaaagttatatggagctccttggttctgtgtcctcaacatgctgttctatgttttttacattctgtttgctccttcctgcttggaatgtccttcccctccccgtctttcttaatgcatacaaagttgatctctcctgtgtgccaccattgtacttcgtcttgcatatggtgttacattcattttattttaattatttatttacgttcatgtctcttccactcaccttagttgcttgaggtcagaaactatataatgtgtgacacggaatgtgacacctagattttcaataagtgtttctatgatacaagggagactgatgtgggtagatgggaatgaactcatcaacctctgtttacataccctaaattccctgtttcttccctattataattctgacagtctacaaccgtctttgatggcttataaacggaaagtgcggaacacatcattctacagtgaatttaaataacctttcggaagagtaacgtaaagtacttgagcattaattgagtaaaagtttctcatcttttcctacaggtgttattaagcagtatgtaaaaagtccttacaatacttaatacattaagaaaacatacaatttcaagaggaaatccccgagtaatacattattgacattttcagcagttctagttatattgagaagagcatctcatggaattggcagaatgaagatggagattaaatgagatgatgtttgtaatatgcttatgacagtatctggcatataagtaagggctcagtaaatgttgactgctgtaattactattaatagtaatatgattacctttagtaaaagttattagtttctttaggttttttgtttactacaatatagtaaacaaaatctatacttggaatgtatatattgttttgttttgatacatggaatatgtctctgtgtcagagtcactgcctgagttggaaaacccatactcgagtatgttaaaaggtgaacacactgaataatttagttattaattataatggaaaaatgacaaacttgatgttctggttaatgaggttatcttatcttgaatgagttagcttttaaattcctcaaaataaaggcatttaataaaccaggaaacacttcattaaaaaaattatgcaagtcagtgtaaaagaagattaaaattccacatgggcaaaggacacacgttggcgataaatatgcagataagaaaaaaaacctatataacattattactcctcaaagaaattggtatgaaaacaataaaaatgtgtagcttatcaaaccaacaaaaatttaaaaatatgaaatccattttaagtaatgataaaatgggtgcactcttagtgctttatagaatagtagtataatgaacctcatgtgtgtaccaaccagctctttcatatcttaacatttagcaacatttgatttagctctttcttttttccaagatagaaaagttaatattgttgaagactcctgcattcttttccctagtcttattttcttccctcccataaatgtgttaaaatctctgtgtgtattgttttggttgtatttttacataaaactttacatattatataaaatttaattgaaggtaaaatttattaaattattcttaatatatattgtaatttaaaaattaacagcttcattgtcttgataaaatttatggtatcttaaacatgtgcttgtttttctaagagaacattgaaacatagattttaaaacaaattgttgaaagattaaaaaatctgcctttgcacactgttacattgaaagtggggcatttgtcgtgaacattcatttcaaatatgtagtatcttcagaatatttgagaaggatttgtattatataattgaaaaatctgttaaattgtatttatgttaactgcttaattctaataaaatttccattcattttttagtatctgcatatatttacatcaaatggattcattcacttatttaagaggcagtactaattacctatagcgttcaagactgttaggtagagggtgtgtagtggtgagtacaacaggcgtgagccctaccaacacggagtttaaagcctagtagaggatatagacttaaacaatttcacaagtaaatacataattacaaattataatacatgctatgaaggaaacataggaggtaccagagaaggaagagtgctttgcatttttatttttaagaccgaagagtgctattggaggactttgagcaagtgaatgacatgatctaacctaccttcgttcattcattcattcattcattttcttccttcctggctcaagcagtcctcccacctgagctccccaaatagctgggactacaggtacacactaccacacctaatttttttttgtattttttgtatttttgatgggattttaccatgttggccaggctggtcttgaactcttgacctcaggtgatccacctgtctcggcctcccaaggtgttgggattataggtgcctagcccatggtgcctagccctaacctacatttataaactatcacttgctgctgtgtggagactatattgtgagattaacagcagggatacctgctaggaagcaattgctgcagattgcctgagacaaaatagttatcatggactagggggatggtggtggtggtggtggtaggtggttggatgtaggatatattttgaagataggtaaatggtgcaagattatgggtcagttttaaatgcttaagtaaattttctttgtaagacattttaggatgccatgttaagaatctctttataactgtcatttaaaaaaaaaccacatattttcttagcataatttcccatagtaacattactatgtcaaaggctatgaacatttgaatgactttagataaatactgtaattgctttccaaaaatattgtgcttattatgtcaccagaaatgtttgaattctgtctacaattcagtcttgccagtatagtacatttcatttagaaaaattttttactatgtagatggaaaaaataatattttagctgggagtggggggactatggggaataactttccttcatttaatattttattgtgagttagtttaagttactttattttatcgtagtttcctaaggctacaaattagtaaccttggtaacttatgtacctaatttaaaagtttacttttttgaaaggctggaaatactaattaaaaacgtaacaccttcatccttgtctttgctccattattaactagtttcattacagaatctctgtgttttaaaatcagatgggttttcataaccagtactttctcagagtggtaaatttaaaaaaatatataaagagaataaataatatttgttgagaatacttcaaataatgtgaagagttattaacttacagcaggagttggcaaacttttctataaagggccatatgggtctttgtcacaaagtcttgggtttttgtttttgtttttttaaacagctatttaactattcctagctaatgggcaatacaaaaacagtgggcaagatttggcctgtgggcagtagcttgctgaaaccttatttagactctaaattttttgaaagagtctacattgatgcatatttttttttcttcctccaaatacagttgacccttgaacaacatgcgtttgagtgaccatgggtccacttgtgatacacgtttttttcccaaccaaatgcagatatggagggctgacttttcatatacctggatgttcctgggccaactgtaggactagaggctgggggggtcttggaaccaatgccgtgtgtataccagggatgactgtttcttatggcctgacctgaagttggaacagaatctttattaatatataatttttgttgcgtttgttttctctttatatttatccattctttttagatcgtatttcatttaacactttttcttctttagtttttaccaagttgcactgaaaatagctcagtgactaattgcacttctaagagtgaggaccctagttaaaattaactctaaaaatactgaatttttaacctaaaccttttatttctaatcaacagtattatttatgagtaggttatagattactttgaaacggaatgtgtctcagaactttgctatcgatatttttaaggtctggtagggaaaagataataggaatgagatttatcagtgaataggggactgctttcccagtttctcggtcgcactggtgtattcaccatggaagcatcttatgaaatatgtacataaactactaatatcccacattacaggttgactattctttatctgaaatgcttaggacctagaagtatttttggattttggtttttcagagtagggatactcagcctacattggtaagtaaagaatgtgaggtgacaggctgggcgcgatggttgacgcctgtaatcccagcactttgggaggccgaggcggatcacctgaggtcaggagttgaagaccagcctggccaatctgtactaaaaatacaaaaattagctggacacagtggcacgtgccagtagtcccagctactcaggaggctgaggtaggagaatcgcttgaacctgggaggcggaggttgcagtgactcgagatcgtgtcactgccctccagcctaggcaacagagcaagactccatctcaaaaaaaaaaaaaaaaaaaaaaaaaaagaatgtgaggtggcagcaataggtaggaagagtctttggtcagctttacatgctctgtagccatgcctgggtaatgggttgactctaagactctgtgctttgctcccacctcctgctttttcattactctttagaatggtttttaatttgtgatctataggagttctttcaagtatttaataagagaataggctaaattaagtaaatgtcaactgaatgctcaaatctctactaaagagcctcttatttagaaaataaatatccatcttttttttctgactggtgagataattaatttttattacagatggtttggaaaataccatatgctttaaaagataagcacaaaattatagtctaatatgtaggttttcatactttaaaaaattgaaaaccaaagaaaaacatttaacatagcatctagtacaaagaaaagagataagcaagagataaatgtcttttttgggacagagttttgctgttgttgcccaggctggagtgcaatggcacaatctcagctcaccgtaacctccacctcccgggttcaagtgattctcctgcctcagcctcccgagtagctgggattacagtcatgcaccaccaggcccaggtaattttgtatgtttagtagagatggggtttctccgtgttggtcaggctgatctcaaactcccgacctcaggtgatctgcccaccttggcctcccaaagtgctgggattacagacatgagccatcgcacccggccaagataaatgtcttttaaattatctccattaaagacataacctttataacattttgatgtatatattaccagtttttaaacacatagtagatttgtataaatacataaacacatattattgtgatcatgctgcacttagacatctttatattctccttatactgtaaacattttgaaatactttactaacaacatttgtaatgaccattctttctctctttctccctctgatagaatggtctacagagtaattcataaactaaacatactttagaggctgggcgcagtggctcatgcctgtaatcccagcactttgagaggctgaggcgtgcagatcacgaggtcaggagttagagaccagcctgactaacatggtgaaaccccatctctactaaaaaaacagtacaaaaattagccgggcgtggtggcgtgcacctagaatcccagctactcaagaggctgaggcaggagaatcactcgagcccaggaggcagaggttgtagtgagccgagattgcaccacagcactccagcctgggcgacagagcgagactccatctcaaaaaaaaaaaaaaaagatacattaatactatagcctacatgtggaacattaagaaaataattgcttttatgtttatgctttatacctgttgttagccctgcttcttatttcatgatttcatggcttcacattgtaacatccctttaccatattttttgaggactgttttggcagaatgtgtgaaatcttgagcagaagtattacccaaaagtcagaagaaaatcagatttttatttcaagattctgttaaagttacccactcccttcttttacttaatcttatagttgcagttctctctctttttagaaaagaaaaaagaggcccctcaggatttgcagatgaaacaatattgctctttagagatatccatctggctgttagattatttttccacagttttcagaagtggatgaggccattagaatcttgagtattgcccatttccttatgtgtgcctttgactatagataaaatagatgcatgacaattatttataagttgattgatttttcttgtcatttaaatcatcttgaataatagagttggtagagctatcccatttttgaaattattttgttttgtcaataactttttgttaccagcatgtacacttgcattgttgactctccatataatacctttaaaaaatttttttttgtggtaaaatatgcataacataaagtttaccatggtagttttctttcatttgttttgtttttgtttttttgagacggagccttgctctgttgccaggctggagtgcagtggagcgatcttggctcactgcaacctccgcctcccgggttcaagcaattcccctgcctcagcctcctgagtagctgggactacaggcgcccgccaccacgcccggctaatattttgtattttaatagagatggggtttcaccatgttggccaggatgttcttgatctcctgacctcatgatccgcccacctcggcctcccaaagtgttgggattgcaagtgtgagccaccgcgcctagaccatggtagttaattttaagtgttcaattcagtgaccttaagtgtgttcataatgttgtgcaaccatcaccatgttgtctaaccattagcactatctgttttgagaacttttttttatcatcccaaattagaattctgtacctgtcaaatagtccccagtaatcctccctcccccagcccctggtaatctgtagtctacttttcgtctttttgaatttgcctattttaggttcctcatataagtggaattatgtggtatttgtccttttgtgttggcttacttcatttagcataatgttttcaaggttcatctgtgttgtagcatgtatatacaggttgaagcatccgttatccaaaatggttgtgaccagaagtggtttggatttcagattttttttttggattttggaatattcatagatacttaactggttcagcatccctcgtccaaaaatccaaaatcagatggagctcagtggctcatgcttgtaatcccaacacgttgggtggccaaggcaggaggatcgcttgagcccaggagttcaaccagcctgagcaacacaagaccctatctctccaaaaaaaaaaaaaaaaaaaaaaagatgaaagaaaaaaaaatccaaaatcaaatgctccagtgagcatttccttttagcatcatgtcaggctctaaaagttacaggttttggagcattttggatttcagatttttggattaacctgcattaatgctcaacctatatgaaattttattcctttttatggctgaataatgttccactgtatgtatatactacattttgtttatccattcatctgttaacagacacttaagttatttccacattttgggtattataaatagtgctgctgcgaacattggtgtacatgtatctgtttgagtccctgtttttagttattttggttatatacctaggaatggaattgctgatcatatggtaattctgtgtttaactttttgaggaactaccactgttttccacaatggcatcaccattttacattcccaccagcaatgcacaaagatttcagtgtctgtatccttgctaacacttattttccattttttgagtttttttgttttgtttttttaataatagccaatcctaatgggtatgtggtagcatctcatggttttgattttattttcctgactattgatgatgttgagcatcttttcaggtgcttagtggccatttgtccgtcatctttggagcaggaacaatgtcttttcaagtcctttgcccatttttaaattgaattttttgttgttgagttgtatataacaccttttttgaagtaaaaggtgcactgtaataatccagactgtgtttctcccttctcaggattcctacaggaagcaagtagtaattgatggagaaacctgtctcttggatattctcgacacagcaggtcaagaggagtacagtgcaatgagggaccagtacatgaggactggggagggctttctttgtgtatttgccataaataatactaaatcatttgaagatattcaccattataggtgggtttaaattgaatataataagctgacattaaggagtaattatagtttttattttttgagtctttgctaatgccatgcatataatatttaataaaaatttttaaataatgtttatgaggtaggtaatatccctgttttataaatgaagttcttgggggattagagcagtggagtaacttgctccagactgcatcggtagtggtggtgctgggattgaaacctaggcctgtttgactccacagccttctgtactcttgactattctacaaaagcaagactttaaactttttagatacatcattaaaaaagaaaaccataaaaaagaatatgaaaagatgatttgagatggtgtcactttaacagtcttaaaagcaatcgtgtgtatagcatagaattgcttggattggataaacagtggcattatatattttaaaaaataaaagttttgaaagattgaagaatttgggcattacagttctcttaaatctgacaaagctgcataaaactattaaaataatcattattatactattttatattctatttctttgagggtttagttttccaaaaactacatattaagcaaatgaatcactcagtggctatgtcatataataacgagttagcctagttataagaagtttaacattttatttaagaacattgttacagcatgtttactgtatagtctagtaatagaggaaaagacatttgggtgggtggtagtggtagtatttttatagaggagttaccaaatttcagctctattatccaagtttacccagctaatggtgttcggaaccgggaatttgagccaattctgactctgttgtctgctctgctccttcttttgtgctgtgtctttgaaagtcacctaaaattgtgagggaatgtaatttcaccccaaatttagagtttatgcacttgttatattgaaaatgattaacatgtagaagggcttttaatggaataagtggtgtagtaacttcagtgttgcctacctagaaatcaaaatctttctagttgtccactttgttttttgaaaaagtaatatgaaaattatgttaatgctttaattcaggtttttgtaaaatattttttatctttacacatttaacatacgtttctaaaattatagtctgttatatagcactttgggtctagaatttttcagtagtttctgttttactattatgatctacctgcatattaacctattaggttatagttttactatacttctaggtatttgatcttttgagagagatacaaggtttctgtttaaaaaggtaaagaaacaaaataactagtagaagaaggaaggaaaatttggtgtagtggaaactaggaattacattgttttctttcagccaaattttatgacaaaagttgtggacaggttttgaaagatatttgtgttactaatgactgtgctataacttttttttctttcccagagaacaaattaaaagagttaaggactctgaagatgtacctatggtcctagtaggaaataaatgtgatttgccttctagaacagtagacacaaaacaggctcaggacttagcaagaagttatggaattccttttattgaaacatcagcaaagacaagacaggtaagtaacactgaaataaatacagatctgttttctgcaaaatcataactgttatgtcatttaatatatcagtttttctctcaattatgctatactaggaaataaaacaatatttagtaaatgtttttgtctcttgagagggcattgcttcttaatccagtgtccatggtactgcttttggctttggtttctttctacattgaaaatttctcttcaattctgagcacatgttaacatttagaattcaagaggtggggatttttttttcccatggttacatatatatatatatatatatatatatatatatatatatatatatatataaagaacagggcaacaaatttttgcgttttctatttcggtagtacttttaaaccattatgtcatgtttctaggttaaacgttgttgtatttgaagaattttactttggcagaatttttttgaggatgtgtttatttctggagaaaggtctcattaaagaaagacaatacccagaaagccaacagaaattctgttactcatttaatgcatttttctgacaaaaattattgccagagagaacctgaattttgtttcaaaaatcatctttgttttaaaaatgactttttcttcaggtaaaataaaataatttcagttgctattatttaacctgtttgtatgaagagtttaacatataggaaatgaatacataaagataggaaggaattaattgttatatgtagtcatatgtctcttaatgacagggatactttctaagaaatacattgttaggtgattttgtcattgtgcaaacatcatagaatatacttacacaaaccttggtagtataacctactatacacctgggatatgtagtatagtctcttgccccagggatacaaacctgtacagtatgtaactgtactaatgactataaggcaattgttaacacaatggtaagttttgtgtgtctaaacctacacttgggctaccctaagtttatatatttttttaaatttctgttcaataataaattaaccttactttactgtaactttttaaactttttaatttttcctaacattttgacttttgtaatacagcttaaaacacacattatacagctatacaaatttttctttccttatatctttattctgtaagcttttttccatatttaaaattttttgtttgtttttacttattaaacttttttgttaaaaactaagacatgcatgcacattaacctaggcctacacagggtcaggaccatcaatatcattgtcttccacttccacatcttgtcccactggaagatcttcaggggcagtaacacacgtggagctgtcatctcctataataacattgccttcttttggaatacctcctgaaggacctatccaaggctgtttatagttaacttttttttttttttttttttttttttagtaaataggaggagtacactataaaataacaatataggtgctataccattatacaactgacagtgcagtaggtttgtttacaccagcatcaccacaaacacgtgagcaatgtgtcgtactacagtgttaggatggctataacatcactaagcaataggaacttttaaactccattataatcttatgggaccactatcacatatgcaatctcctgtggaccaaaatgtcattatgtggtacatgactgtactaagaaattgatccatctatattccatcaatttgtttagggctttttctggttacatttacctgtgagcccagaaaaccagttttgtagaaattaacttctgtaatgctaggagttaaaaaaaattgctgaacaacttttacattgttaaacatttaaaaacaagcgttctagaagtttatcaaatttcataaaggtgcaaaaatgtaaatgtaaatcattatccagctaatatatatgttgtatttccctagtaggagagcatatgtacctcttcctagttatacaaatttgatatatagtaaagaaacagtaaattctacttcaagtcattttgggaggattaaaaactgaatttctctagtttgaccattgtacagatttatctggcaattttactaaaacctgatttataggttaaacttggtgtatatcatatatcactttactttagaggaattaagatttcacataaatccatttccaggttccaaagaccaggaagaggcttggtttttgtttttctttttactgtctttacagtctccttgacttttcttaggagagaaggtactgagaaaacatgattctaatatttattattttttcttccaacattttcttatgaaacattttcaaatacaaaattgagttttatttaaaacatttgcaaatatactacctagattctaccattgttgttttatatttgctttacttacaacttttaaaagatgctttttataccactgaacattttagcttacatttcacaaagaaaagaaaaaatttaagagactttgcataatgttttaaggggttgcagtaaagaagtgcttcttatattttcttatgcatacaaatcagctgggcttattaaaatccagattctaattcagaaggtttaggtggggaccgagtctgcatttctaacaaactcctaggtggtatttttcttggtacttggaccatactttgagtagaaaagcagtagaggacataaaaagagtcttgttagtcccactttgttgctgtccacttctcatttgataatatcctaaaatagctgtgtctcctttttggtggttgtatgattactacctcagaagtactaattgattcttgctatttgaccttaatactttaatataacacagcattcatatttgatcagaaaactatctggcttccttttataagagatttttaggttttatacagttttgtggccttgggtttttttgtttgatttgtttttttgaaggtatataatatgtaagtagataaacaaatttgatttgtagacatttttatgtggatcatctaattaaaaatggagggatacagtatgaaagaatacttgtacttcttaacagagcactcaacctttcttttacatcctgtttcactgatgttattatgtaatttatgttgctaaactataaattagatatttaatttctgttctttgatttccttttattattaaatggacttgttgatttgcctagaaattaatttgcctttcaaaagtcttattaatcttcctccgttgaaattaatttgatatttgcatgcttctggaagactttaaagagctattccgagtaactgtagagattataaaatgaaatatgggaattttaataaattttacatctccagttactggtgaaaatgtcaagtcctcctttctgcagagtattttgttactcatctgttattcagcttatttatttatttatttatttatttatttttctttctttcttgttttttttttttgagacggagtcttgctttgtcgcccaggctggagtacagtggtgggatcttggctcactgcaggctccgcctcccgggttcacaccattcttctgcctcagcctcccaagtagctgggactacaggcacccgccaccatgccttgctaaatttttgtatttttagtagagacgggtttcactgtgttagccaggatggtctcgatctcttgacctcgtgatccacctgcctcggcctcccaaagtgctgggattacaggcatgagccaccgcgcctggcccttatttgttttttaaacaaaattagtgtgcatatccttgttgtattttatcggcaagttgttttatgccctaacttttggggtcttgatcatgagcctaaaacacgtaaacacccaaaaagaattatattccggttaaaggaacaaaacattcatttagaagttctcatccatgtaaatcagaggctggcaaatattttctgtaaagggccaagatagtaaatgttttaggctttgagggccacaagtggtatctgttgcatttttttttaattatgaccctttaaaatgcaaaaatcgttgttagcttgtgcatagtataaaaataggctggccgcatgctgtggctcatgcctgtaatcccagaaatgaggtgggaagccgaggtgggcacaccacctgaggtcaggagttcgaggccagcctggccaacgtggttgaaaccccgtctctactaaaaatacaaaacttagccaggcgtggtggcgggtgcctgttatcctggctactcaaggggctgaggcagtagaattgcttgaacctgagaggcagaggctgtagtgagcccagatcaagccagtgcacaccagcctggacgaccgagcgagactctgtctcaaaaaaaaaaaaaaaaggctgtggctgcatttggtccattggctgtaatatgctgattcctaattctctgggtaactttagtgtttgattagctactagaagttaggttaaacttttgtattttacaggctaactttaataatcttaaagtaaaacttaacatagttcatggaaaggaaatagaaattttaccctagtactcttttttttttttttttttttttttgaggcagagtctccctctgtcacccaggctggagtgcagtggtgggatcttggctgattgcaacctcctcctcctgggttcaagcaattcttgtgcctcagcctcccgagcagctgggactacaggcacgcaccaccacacctgactgatttttgtatttttagtagagacagggtttcgccatgttggccaggctggtcttgaactcctggcatcaagtgatcctcccatctgagcctcccagtgtgctgggattacagacgtgagtcactgtgcctggtctctagtattttttttttttttgagacggtctcactgttgccaggctggagtgcagtggcgcgatcctggctcactgcaacctccgcttcccggattcaagcgattttcctgcctcagcctcctgagtagctgggactatgggtgcacaccaccacgcccagctaatttttgtatttttagtagagacggggtttcaccatgttggccaatatggtctcaatctcttgacctcgtgatctgcccgtctcggcctcccaaagtgctgggattacaggcgtgagccactgtgcccagctgtactttttaagataagaattgcagggtatatatttttaccaacttaataacttataattttaaaaagctaattacttggctagaatataatgcgttacatattctttacactcagttcagtccatatctgaaaggcaaatagaattattttctgctagtacattgtgtagtccctatgttcctagtgtataaggactgttacctagttcacatttatctgggttgttgacagattttcctggtccctttggacagtgcatggccatgttggcaaaagctgtcaaaattgaaacattgacaccatgagaattgtgtgttttccagtctgctaaaatcaaaagtgggagggttcagtaaggtgaataacagaagcagagttttcggggtatctgttactcctcattcggcttttctgctctctgggggtctcaatttaaatataatgtgaaaattagttttacgaacctaaaaatgttgagtgattcatttcctggttttgttgttaatttctagatatttaaattaattgttagaagaaccccgttaaagaatgctttgcaaaacaacctccttatgtgctatgtctctgtttaatagtagttgagtttgtgtacatgagatcaatattttgaactatagctttttatgagttaaaaattgacggaacagttactgtgcacttgctgtgcaccatggtagtctcccaagtagtggtttttctgcatttcaatagtacatgagataggctgtgggtggcaaggtttcttgagaaagtgagggatgcacagttgggttttagaatacatcttgttcctccatgcccttccccaccaaaaggctggtagtcttgcatttgtatatagttagggtatttgatgtgttgcttccttgacagagttttgcaagaatttgcagatttaacaggaacaaaaacttacttaaaacaaaatctcttagtaaaagcatagtctagcaagatttagaatgatactttggctaacagtactttctctatatggagtgctttgtttccatagcctcacaagtatgttttcagataatagttgagttgaaaatgttgtcaatctcttgattttaaaaaatttacatatttaaagttgtatacttttgttcctacgtattttcagttgttcttaaagtttaataagtgacatttgaaaatgagtatatgtgtataaaaacaaaagtaggctaggcacggtggctcatgcctataatcctagcactttgggaggctgaggcaggcggatcacaaggtcaggagtttgagaccagcctgggcaatatggtgaaacccccctctactaaaaatacaaaaattagctgggtgtggtggtgcatgcctgtagtcccagctactcaggaggctgaggcaggagaatcgcttgaacccggaggtggcggttgcagtgagccgagattgcaccactgcagtccagcctgggcggcagagcgagactccatctcaaaaaaaaaaaacaaaaaaagaaaaagttaaaaaaaaacaaaaaacccccacaaaatgagtatatgtggcaacaagtcctattctcaaaaaaattattgtgtgctagttaagagcttaatgagtagccagtcggtattaaatatctgtttcagctatattttatctttaaaaattatctacagattttggaatgtgaaaaactagtgttttgtttcataggtatatactgtaggcattttaaaaataagagccagtgccagtggtttacagtgtacacaaggataatgttctcatgttctcttgatgtcagtatgactttaaagcatattatcaagaaataactaagtctgaaaaactgtggtaaataactggtactctaaaacctaagtttcttattactaaaaataagaaatggtaaaagtcaccctgtgctgttaattatatgagccactgaggtcctgacactgaattcttggtggtggataataatctcttctttttaattattggcttccaattctctctgcattgctggaaacaaaaatcatatatttcactattggtggtggggatgctgtcactgaaaaagtagacacattcatattgattttagaaataagttaaaatcaaaatttgcttctgctaaattagtagaggaccaatactgtttttctccttcatagtatgttttggtacttctacattgacattataacttttttttttttaaacagaaatagaagtttacattcttagaaaatttatgaaaatatgagcttttacctggtttgtgtgtgtgcgtatatatatacacatatttttaaatttcttacattgattttcaaattgaaagagaaccatttgtgaaagtatcttaacagagctcatgctttacattttacatgctacaaagttattttagtgccttaaattatttatgttgcttattaatgaaaattttggatacataattttttcaagacaaaggtaaaaataataaaccctttccttctgaggattaatgataaatataaactttaaaacgattaaaaaaatttttttagagacagggtcttgctctgttgcccagactgaagtgcagtggtgcagtcatagctcaatgaagcctcaaactcctgggcccaggcaaccctcctgcctcagccttttgagtagctgggacttcaggctcatgccaacatgcctaatttatcttatttttagtagagatgaggtctcaaactcctggcatctcttgccctctcaaagtgctggtactacaggcattagtcaccacacctgacacttaaaatcttttatatacaggtgtaagtgggtatctaacttaaagtgccaacgaatgtagttgaaagtttgtagttggcttagctaactagttaactaaattgattccattaaaaataagataagactgctcttagaatataatgatttttgttattcgttaaatataaatatatcactggatagtatatgttaatgacttgagatacgcattttaacatataatcacgttacttaaatgcctgcctttgaactgaaacttaacattatgaatttaaattaaagtttgactttagaggtaaatttctgtactttactaaagcagttcttaatataattctgagatttctaaaaattagtgtgccctaaagaattgaggtgtgtttttcttaactactgtaggcagtagatgtacagatgacttctgcatgcaaaaattaagccctagccattggtttacttcaactaatacttagttgccaattctctgtgtgtgattgaatttaaaactgcaaatggtactggtgatacattaactttttaggtgctaggtccactttgttacatttggttcagtagaaacattgatgttaccaatctcagaaagctaaaatatgtatgccaatccccaaattaggtaatttattcttaattttaagataaaagaatagaattcccttaaaattaaatgtggagtaaaatataccagctttaaaaaatattcacctttctgttagaagaatgaacataatattacatcttttaatttgcactatatatagattaatatttctgtgtatttctctgtgcccctactttgatggtatgcttttctgaacaaactagcagcacagttaactaagcactttgccccgtttgatgactgcctaattttctagattggaaaatattaaaaacttttatctccatatggccaatatatgattgtacctgttgtcatagctctcttatgtttaagcaagaaaaaccctattaagagtatttaaattagaatggaaggcacacagccagtatgattgaacactgttctaaaaattatttttaagacttgtagtaaggccaggtttggtggctcatggctgtaatcccagcccttaggaggccaaggtgggcggatcacttgtgctcaggagtttgagaccagcccgggcaacatggcaaaaccctgtctctacgaaaaatacaaaaatcagtcaggtgtggtggtgcttgcctgtagtcccagctatttgagaggctgaggcagggggatcacctagcctgggaggtcgaggctgcagtcatgatcgtgccattgcactccatcctgggcaacccagtgagaccctgtctctaaaacaaaaaaataaaaaaagaacttgtagtaaggatacaaaatgctcctattttgtgtgtgtcctttaattcatgatgtttttatattatggtaagcagctctcatttaagattttaataatgtaattaaacatgtacagaagacccagtctcagcttcacttgtataccctggaaatagactgaaaggtgttaaaatttaagataaaactcaaggttccagtttcttgactcacctttgagattcttttatgtttttgttgttttttaacaaaggtttcacgtccatattttaccatttttcttctcattctcccctggaggagggtgtgggaatcgatagtatataaatcacttttttcctaagtcaaagaagtaatttaaagctaacttcagtttaggctttaattccaggactagcaaactaaaatggttgcattaattgacaaacagatgctaatacctgtgtttaggcttgtcataatctctcctaattcctaatttaaaaattttaaaatttaattccattagaaaacaaaactgacttttaagaacaaaccaggattctagcccatattttaaaactgcatcctcagttttattcaaacagtctgatgtctgtttaaaaaaaaaaaaatctcaagctcataatctcaaacttcttgcacatggctttcccagtaaattactcttaccaatgcaacagactttaaagaagttgtgttttacaatgcagagagtggaggatgctttttatacattggtgagagagatccgacaatacagattgaaaaaaatcagcaaagaagaaaagactcctggctgtgtgaaaattaaaaaatgcattataatgtaatctggtaagtttaagttcagcacattaattttggcagaaagcagatgtcttttaaaggtaacaaggtggcaaccactttagaactacttaggtgtagtattctaacttgaagtattaaaagataagaaacttgtttccataattagtacatttatttttaatctagtgggaattaattataattgagacaattttgatggctgtagtagactaatctatatttggcataaagtctaatgatttaatgagtcttaagtaaactaaatatttggaaactgatatttacctttatttttaagggaaaagttttgagataatcagcagcttttttttttttttttttttttttagtagggagaaaaagatatgagctatagtagacagcagtaatattgaatggcccagaaggtgggaaaaagccactcttaaatgtattttttcttttggatattttacaagcaaataataacttctgcctaagttcgccatctcagtggcatcagcagcacagcactttcttatcccagtgagaaacctgggaattttaggatgactcctaccgccctcttttccccctggtttggaagtatccacaaattcctgtgacgttacattctgtgtcttttatgtcatcattagttcaggcccctatcatttcttgttggactgttagaacctcctatttggtttaccagttgctgccatcattcattgtgaaaccggagagatacactttaaagaaatgtcatttttggccgggcgcggtggctcacgcctgtaatcccagcactttgggaggcctaggcgggtgatcacctgaggtcaggagttcaagaccagcctggctaacatggtgaaaccctatttctactaaaaatacaaaaaattagccgggcgtggtggcacgtgcctgtaatcccagctacttgggaggctgaggcaggagaattgcttgaacctgggaggcagaggttgcagtgagctgagaatgcaccattgcactccagcttgagcaacaagagcgaaactctgtctcaaaaaaaaaaaaaaaaagtcattttagctatagaataaaatctcatgttccacatgtgttgcagatagtccttactaccttcccaccactccagctcttttttggtcttatatctaaaaacgtcatcttgcctgaatttcttttgttcttctataaataaataccatgttatttcctaccttcccttgagtcttggctcttgtttggaatgccagtatttttatccctagtcttactaattagctaacactctcatgattccccagtctcctactctctaaaaacctttctttaaacccttagactaggcatggagcccttcctgtgtattcccagaatactattcttaactattatatgcttcccatgttatgttgaaataactaacctcttctgtttcattcctatattacttgacagcaaaatcttagccagaattacatatttttaatctttgcacacccattgcctagtaaggttcctgggacatagtaactacccagtaaatatttattgcgtggaattctcattttcgtttctaaacccgtattaaactctgtcttgctcagaaaatacttcactaggtatcataaagttcatggcagagcttaagctttggatgcatattgtttgtaatatatcatgttcttaagaataggcaataaaattacagttttcaaaaactactacatttattatatttattacaagttggtgttctttattacatgaattttaggtatttcccaaaagtataaaatatacatttgaatagtagactcaatcccaaaagatactacgtggtgtactaatctactaaactcagaaacaaagcatgactggcattaatttttgttgaaatttatgaactctgaatgtttttgaatatcattctgtaaagcaatattttgcaattaaagcaattttgcatgttaaattttaccacaacctctaaaatattgcaaatttaacaatacagtttgaaaagttacacattttaaataacagtaccatgaccagatttaggtggtggttttaattttttattttctcctcctattgtctcaccattagatgattttaaaaatagaattgtttagagtaaaataagtgttatgctctaatttatatttaaaatgaaggtttaagcacgtactattctaaaatttctaatttgtgcaaattatgttttatacagtgactgtaggtgaatgtcacaattgtttgatgtgacgaatccttgtttttcagtacacgtggaagtaattcatataaaagagaagtatacttggtaattaaaaatttaaaattaaatacaatttaaaaaaaaatttatttgacaagctggctgtggtgtgtgtgcctgtagtatcagctgcttgggagcctgaggcaggaggattgcctgaccccaggagtttgaggttgaagggagctatgatggtgccatggcactgtagcctaggcaacagaaagagactccatctcttaaaaaaagtaaaaataaaaaaattttggcacagggacagtggctcacacttataatgccagaactttaggagtccacagcgcgaggactgcttgaggccaggagtttaagaccagactgggcaacgtaatgagaccccacctttaggaaataaatacataaataaaaatttgacaatgataaacatatataaattagcttttcttagtcctgaaaaagataatgttatgtgtatgtgtgagaatgattagttctcatatgagaaaaaaagaattcattgctctgtgtaggttgtgacatttccttcacgattgaaattaattaatttttttttattacttatttatttttaaaatagagacaggttcttgctgtgttgcccaggctggtctcaaactcctggcctcaagcagttctcctgcctcagcctcccaaattgctgtgactgtaggtgtgagccactgcactgggccaaaattacttaattttaacaagatgatgtagagaggagagttcattgcaacataagcctagaatctttgtcagaatcttaggaagtaatgttttcaaattctgtgttttcaccataaaatgtgtcttctctgtgtccatcacatggtttttcattgttttctgctttaccattttagtaccattggcatttttcttcattgtaaaagtagtagaaatggagtagattacataaggatgtgatcagagggaatttattcattcagggtaagggagttagatcctcttttaagattctatcacattctaagggtttatgattctaaactgtcaagtaaattgtcaagtgctggcaagctacagaataatttttattgtatcattggaaattttcccctctatatgtgttaaagagtttagcctgaagggatacatacacatacatatatgtaatcaaaccttgatggtattgtattgctgataaattatttcttaccacttttcctttctcctgtgggagaaacaaaagcatatgtttgtgtagtatcagtaatgatattagagagtgggaaacatcagtgagtgcagtttggggactttattggagactttcactagtgctcaaataaataatgctggtttttatcctactgtttgcttaatgtggactagcctcttattcccattctatgtttacctctcttaaaatattggtcacgctttcttgaattatagatctattaggaaaattcatgaactgtagctaattttcattgttcatgctccagatttattttgaaatatcgttaatcttagtagtacagtaaaggagaaataccacttaacattttttgtttttttttctttgagacagagtcatgctctgtcacccagtctggagtgcagtggtgctatctcggctcactgcaatgcacttcgcctctccgggttcagcaattctcctgcctcagcctcctgagtagctgggattacaggcacctgctaccacacccagctaatttttgtatttttagtagagacagggtttcaccatgttggccaggctggtctgaaactcctcacctcaagtgatccacccgtcttggcctcccaaagtgctgggattacaggcttgagccaccgcaccccgcccacttaacattttaaattaatttcaagataatatcacttgaatatttttacacatataatttttttaatacatttatttacacagtttataatatcctacaaagtgattacaatgagtaaaaacccagttttcattgttcctaaagtggcttgatttatacaacttaatgtgttgggtatttgtttctaagactccctctgctgtctaggtttggaagtattgtgaggttaacagattttctttttatagttactactcagttgaacaggctttaaaatacagagagaatcatattttttcttcattttttgcttttatttatatttttcttttaattggagacatgacaagaattgacttgtgtatggatcttgcataatttaagtactgcaggtttaaaatctactaccagtttgagagtgccatttttcacactgtagattattaggttgaaaagtattatggcttaaaatcgcttttagccattaaatttaaataaccttgctttaatcataaatagatggtggtcacaatgactaactgttaaactctttgaagacaggatatttggctttatatggcaagcttttgaatacaacagaaattaaaactttatgggatagaaagaatctcctccaaattggtaaactataagacctttcaaatgatttagctaatttctccacaaatctgaggtattagtgttttttttaaagtggtattctcctgtgttggggtcactttaaacctttttcttaatgataaatatatgaattgaaactaatcccttaatatatatcatttgaaaactgaaataatatgtttagatactgtttacttgttgataaattattggaataggatgttcgaatactgtttacttcttggtaaatttttaaatccaatggattttacgtaagtatagaactggagctcaaatactgttactgtgtgtgaagatatatgaacatagtttacagttgcatggcttatatctaaagtccagaaacataaggacaattaagtgtacacacacacacatgcatttggattttgatgacttaggtttgccaatgtggaaaaaatagtagcaaattaagttctcctgtgaaaaagtcgttaccttatttaaaattctgtgccattggttatccttgtcttttgtgaaaattagtgttcctgtttataatattgacaaaacacctatgcggatgacatttaagaattctaaaagtcctaatatatgtaatatatattcagttgcctgaagagaaacataaagaatcctttcttaatattttttccattaatgaaatttgttacctgtacacatgaagccatcgtatatattcacattttaatactttttatgtatttcagggtgttgatgatgccttctatacattagttcgagaaattcgaaaacataaagaaaagatgagcaaagatggtaaaaagaagaaaaagaagtcaaagacaaagtgtgtaattatgtaaatacaatttgtacttttttcttaaggcatactagtacaagtggtaatttttgtacattacactaaattattagcatttgttttagcattacctaatttttttcctgctccatgcagactgttagcttttaccttaaatgcttattttaaaatgacagtggaagtttttttttcctctaagtgccagtattcccagagttttggtttttgaactagcaatgcctgtgaaaaagaaactgaatacctaagatttctgtcttggggcttttggtgcatgcagttgattacttcttatttttcttaccaattgtgaatgttggtgtgaaacaaattaatgaagcttttgaatcatccctattctgtgttttatctagtcacataaatggattaattactaatttcagttgagaccttctaattggtttttactgaaacattgagggaacacaaatttatgggcttcctgatgatgattcttctaggcatcatgtcctatagtttgtcatccctgatgaatgtaaagttacactgttcacaaaggttttgtctcctttccactgctattagtcatggtcactctccccaaaatattatattttttctataaaaagaaaaaaatggaaaaaaattacaaggcaatggaaactattataaggccatttccttttcacattagataaattactataaagactcctaatagcttttcctgttaaggcagacccagtatgaaatggggattattatagcaaccattttggggctatatttacatgctactaaatttttataataattgaaaagattttaacaagtataaaaaattctcataggaattaaatgtagtctccctgtgtcagactgctctttcatagtataactttaaatcttttcttcaacttgagtctttgaagatagttttaattctgcttgtgacattaaaagattatttgggccagttatagcttattaggtgttgaagagaccaaggttgcaaggccaggccctgtgtgaacctttgagctttcatagagagtttcacagcatggactgtgtccccacggtcatccagtgttgtcatgcattggttagtcaaaatggggagggactagggcagtttggatagctcaacaagatacaatctcactctgtggtggtcctgctgacaaatcaagagcattgcttttgtttcttaagaaaacaaactcttttttaaaaattacttttaaatattaactcaaaagttgagattttggggtggtggtgtgccaagacattaattttttttttaaacaatgaagtgaaaaagttttacaatctctaggtttggctagttctcttaacactggttaaattaacattgcataaacacttttcaagtctgatccatatttaataatgctttaaaataaaaataaaaacaatccttttgataaatttaaaatgttacttattttaaaataaatgaagtgagatggcatggtgaggtgaaagtatcactggactaggaagaaggtgacttaggttctagataggtgtcttttaggactctgattttgaggacatcacttactatccatttcttcatgttaaaagaagtcatctcaaactcttagttttttttttttacaactatgtaatttatattccatttacataaggatacacttatttgtcaagctcagcacaatctgtaaatttttaacctatgttacaccatcttcagtgccagtcttgggcaaaattgtgcaagaggtgaagtttatatttgaatatccattctcgttttaggactcttcttccatattagtgtcatcttgcctccctaccttccacatgccccatgacttgatgcagttttaatacttgtaattcccctaaccataagatttactgctgctgtggatatctccatgaagttttcccactgagtcacatcagaaatgccctacatcttatttcctcagggctcaagagaatctgacagataccataaagggatttgacctaatcactaattttcaggtggtggctgatgctttgaacatctctttgctgcccaatccattagcgacagtaggatttttcaaacctggtatgaatagacagaaccctatccagtggaaggagaatttaataaagatagtgctgaaagaattccttaggtaatctataactaggactactcctggtaacagtaatacattccattgttttagtaaccagaaatcttcatgcaatgaaaaatactttaattcatgaagcttactttttttttttggtgtcagagtctcgctcttgtcacccaggctggaatgcagtggcgccatctcagctcactgcaacctccatctcccaggttcaagcgattctcgtgcctcggcctcctgagtagctgggattacaggcgtgtgccactacactcaactaatttttgtatttttaggagagacggggtttcaccctgttggccaggctggtctcgaactcctgacctcaagtgattcacccaccttggcctcataaacctgttttgcagaactcatttattcagcaaatatttattgagtgcctaccagatgccagtcaccacacaaggcactgggtatatggtatccccaaacaagagacataatcccggtccttaggtagtgctagtgtggtctgtaatatcttactaaggcctttggtatacgacccagagataacacgatgcgtattttagttttgcaaagaaggggtttggtctctgtgccagctctataattgttttgctacgattccactgaaactcttcgatcaagctactttatgtaaatcacttcattgttttaaaggaataaacttgattatattgtttttttatttggcataactgtgattcttttaggacaattactgtacacattaaggtgtatgtcagatattcatattgacccaaatgtgtaatattccagttttctctgcataagtaattaaaatatacttaaaaattaatagttttatctgggtacaaataaacaggtgcctgaactagttcacagacaaggaaacttctatgtaaaaatcactatgatttctgaattgctatgtgaaactacagatctttggaacactgtttaggtagggtgttaagacttacacagtacctcgtttctacacagagaaagaaatggccatacttcaggaactgcagtgcttatgaggggatatttaggcctcttgaatttttgatgtagatgggcatttttttaaggtagtggttaattacctttatgtgaactttgaatggtttaacaaaagatttgtttttgtagagattttaaagggggagaattctagaaataaatgttacctaattattacagccttaaagacaaaaatccttgttgaagtttttttaaaaaaagctaaattacatagacttaggcattaacatgtttgtggaagaatatagcagacgtatattgtatcatttgagtgaatgttcccaagtaggcattctaggctctatttaactgagtcacactgcataggaatttagaacctaacttttataggttatcaaaactgttgtcaccattgcacaattttgtcctaatatatacatagaaactttgtggggcatgttaagttacagtttgcacaagttcatctcatttgtattccattgattttttttttcttctaaacattttttcttcaaacagtatataactttttttaggggatttttttttagacagcaaaaactatctgaagatttccatttgtcaaaaagtaatgatttcttgataattgtgtagtaatgttttttagaacccagcagttaccttaaagctgaatttatatttagtaacttctgtgttaatactggatagcatgaattctgcattgagaaactgaatagctgtcataaaatgaaactttctttctaaagaaagatactcacatgagttcttgaagaatagtcataactagattaagatctgtgttttagtttaatagtttgaagtgcctgtttgggataatgataggtaatttagatgaatttaggggaaaaaaaagttatctgcagatatgttgagggcccatctctccccccacacccccacagagctaactgggttacagtgttttatccgaaagtttccaattccactgtcttgtgttttcatgttgaaaatacttttgcatttttcctttgagtgccaatttcttactagtactatttcttaatgtaacatgtttacctggaatgtattttaactatttttgtatagtgtaaactgaaacatgcacattttgtacattgtgctttcttttgtgggacatatgcagtgtgatccagttgttttccatcatttggttgcgctgacctaggaatgttggtcatatcaaacattaaaaatgaccactcttttaattgaaattaacttttaaatgtttataggagtatgtgctgtgaagtgatctaaaatttgtaatatttttgtcatgaactgtactactcctaattattgtaatgtaataaaaatagttacagtgac

SEQ ID NO: 42 - protein, 464 aa, Homo sapiens
  REGION 1..464: note = N-myc proto-oncogene protein
MPSCSTSTMPGMICKNPDLEFDSLQPCFYPDEDDFYFGGPDSTPPGEDIWKKFELLPTPPLSPSRGFAEHSSEPPSWVTEMLLENELWGSPAEEDAFGLGGLGGLTPNPVILQDCMWSGFSAREKLERAVSEKLQHGRGPPTAGSTAQSPGAGAASPAGRGHGGAAGAGRAGAALPAELAHPAAECVDPAVVFPFPVNKREPAPVPAAPASAPAAGPAVASGAGIAAPAGAPGVAPPRPGGRQTSGGDHKALSTSGEDTLSDSDDEDDEEEDEEEEIDVVTVEKRRSSSNTKAVTTFTITVRPKNAALGPGRAQSSELILKRCLPIHQQHNYAAPSPYVESEDAPPQKKIKSEASPRPLKSVIPPKAKSLSPRNSDSEDSERRRNHNILERQRRNDLRSSFLTLRDHVPELVKNEKAAKVVILKKATEYVHSLQAEEHQLLLEKEKLQARQQQLLKKIEHARTC

SEQ ID NO: 43 - DNA, 196424 bp, Homo sapiens
  misc_feature 1..196424: note = BCL2
  source 1..196424: mol_type = genomic DNA
acccctcgccgcaccacacacagcgcgggcttctagcgctcggcaccggcgggccaggcgcgtcctgccttcatttatccagcagcttttcggaaaatgcatttgctgttcggagtttaatcagaagaggattcctgcctccgtccccggctccttcatcgtcccctctcccctgtctctctcctggggaggcgtgaagcggtcccgtggatagagattcatgcctgtgcccgcgcgtgtgtgcgcgcgtgtaaattgccgagaaggggaaaacatcacaggacttctgcgaataccggactgaaaattgtaattcatctgccgccgccgctgccttttttttttctcgagctcttgagatctccggttgggattcctgcggattgacatttctgtgaagcagaagtctgggaatcgatctggaaatcctcctaatttttactccctctccccgcgactcctgattcattgggaagtttcaaatcagctataactggagagtgctgaagattgatgggatcgttgccttatgcatttgttttggttttacaaaaaggaaacttgacagaggatcatgctgtacttaaaaaatacaagtaagttctctgcacaggaaattggtttaatgtaactttcaatggaaacctttgagattttttacttaaagtgcattcgagtaaatttaatttccaggcagcttaatacattctttttagccgtgttacttgtagtgtgtatgccctgctttcactcagtgtgtacagggaaacgcacctgattttttacttattagtttgttttttctttaacctttcagcatcacagaggaagtagactgatattaacaatacttactaataataacgtgcctcatgaaataaagatccgaaaggaattggaataaaaatttcctgcatctcatgccaagggggaaacaccagaatcaagtgttccgcgtgattgaagacaccccctcgtccaagaatgcaaagcacatccaataaaatagctggattataactcctcttctttctctgggggccgtggggtgggagctggggcgagaggtgccgttggcccccgttgcttttcctctgggaaggatggcgcacgctgggagaacagggtacgataaccgggagatagtgatgaagtacatccattataagctgtcgcagaggggctacgagtgggatgcgggagatgtgggcgccgcgcccccgggggccgcccccgcaccgggcatcttctcctcccagcccgggcacacgccccatccagccgcatcccgggacccggtcgccaggacctcgccgctgcagaccccggctgcccccggcgccgccgcggggcctgcgctcagcccggtgccacctgtggtccacctgaccctccgccaggccggcgacgacttctcccgccgctaccgccgcgacttcgccgagatgtccagccagctgcacctgacgcccttcaccgcgcggggacgctttgccacggtggtggaggagctcttcagggacggggtgaactgggggaggattgtggccttctttgagttcggtggggtcatgtgtgtggagagcgtcaaccgggagatgtcgcccctggtggacaacatcgccctgtggatgactgagtacctgaaccggcacctgcacacctggatccaggataacggaggctgggtaggtgcacttggtgatgtgagtctgggctgaggccacaggtccgagatgcgggggttggagtgcgggtgggctcctggggcaatgggaggctgtggagccggcgaaataaaatcagagttgttgcttcccggcgtccctacctcctcctctggacaaagcgttcactcccaacctgaccgataacgcctgccatctaaaagtctttaacttgcttgctagtcgtggagatccaaagatctagcgtttgtaatccagtaggatgtggtggtaaatggtaccccttcagtgtttctcaagctgaaggtccaggagtccccaggaccaccgtttcctggcttgagcagcttgttggaaccggagggaggtttcagggactgcttatgaaccagataccaggttgggtcttgacagtctgcatcccaaacaagctcccctgaaacaagcccgttgtacactaaaattggagaacaacccgattagaagaatagactccacagaagaccaagggcatcatcaatcggtaaaattttccaaaagaggaaaaccaatgtaagtctttttccctgaaaaacttagttgtgtttgtaaagagctaagttgacattccaaagtccttggactggaatctccagtgtgtgccatgttcccagtgggcgtgatgaggtgtcctgaggagtatcaggctatggctttgctaccttgtcagtgacagaatttgcatcggctgcattctttgtattctataatttgtgtatggtttaccagtttgctagaatgttagaatcttttgtttttcaccactcagagtggacctaattttgtggtcggctgaaaaaaatttgcatctaggtatctatgtaaagtgtagaagaattgattcttagctgtggattatcttacccttactttagttgaagtgattgatacctgtggctttgaagaacatttgtgagatgatctttttctcgtactgtgctagatagagctttcatcattataccatacaattgtacttttctgagattctttgttggagggggtttagttcctaagagtcaaggattgtaatggagatctatatctcatatctaaaatgatgaatttatgaaaaagtaattcttgtgtgaagttttttttttttttacactttttgttttaatctgaagagttatctttgaaaaacaggatgcaattcagtgcttccttttatagcctcttgggagaatgactaatgtcattattttataggacctaacaggagcaaaaagcctagaaattactgcaagtggattagatgtcaagaagcacaccacatgtttttattacattttacaaagtgtgctcatactaggaggccaaatagagaaaaggccaagaaaagtagatgattgatgtgaacatctgatcttatttgaccaaagttgacaaaatattgatgccactgtttggtgtttaaaagtaagattaactaaaatgccccaatttaaatttctaaaatttaaatcctcttcttgaattgtttgtttgttgagatctcacattatcagatctttagtaattctggaagaatttgctaaagggtgaaaagaatatttttgttaaatatttggttaagtaggtggtttgatttttaatcactataactaaaggggttgggacttccagattcccaaaggatccttttaaaccaaagtaaaactgatttaatagttttactatttcacatttttgtgaaaaattcacacttacaaattttctttctacttgaaataaatccaaggtggtaactggtatctgtctatcaaataagttaataaaaatgtgggaaacagagacacatgtttatgacagaaattaagatacaaccttgatatttgttgctgaatttcagtgtgttaccctctcatgtaactgaagtttctttttaagtaaaggctcacttttttctttttgtgaaacagagttttcatagtagacctatctttgtggtcaacaggtatctgaggttgataaatgtagaggctacattttatgatgccaaaccacaatgacataccatagaacatgataaaaattttttgacaaaactgcttctagtaaaaataaatcatgtagaagcacagatggttgatggtaaaatatgtaatagctttcagaacaatgcatagatggtgactatataggaaaacaaaggaatttagagaaaaaatatatatatataccaggaaatgcactcataggacactttggaataaaagtggtagtgtttgagaatgatgaatgatttgcctatcatttcaaatgtgcattattaatctaaaagtcattttaggcatttggcatacagacagattttcttcacatttacaccaattggggttacatctctaataatatgttgtattttatagtgtaaggtagtcttaatggtaaagcttcagaagagagctagcatattttcttggcatgtgacaataatctgcactgtccccagggctccgtggattagcccatctcctgaatactacactgaatactccaggctttagactgcaagtcatttctttttctttgctgctgctcgtagaaaattggaaccttgtgaggctgaggaaatctgtttgacttttgtgttccataacatggataaatcaggtccttggaatgatcagcctctgatagattgtcccagaagactacaaattaaataaagactaaagaagtaattggctgtagagtggagtgtggatttattcctaggtctgaataaggcattgtgtggcatccagagagaggcaggacagaggaagcagtgagagagaagcaattctagaaaatgtggataccttgctgctcagtgtggcttatagacagtagcacatgcatcccccggagctttgtagagatgctaaagctcagctcccaccccagagctactgagtcagaatatgtggtttgtgtgcacgttaaagttagcgatgctggctaccatccttggttcctggtggcatcttttaggaagagttgctacctgggatggattctgcattgtccccttccagtggccttaaagatctatagtgttacttggaataccgagtatttcccaggtgtccactattgtgatctgactttaggaagacataaattggatgaaggagagatagcaagcaggtagatcaactataagcccagtcttctcatgaatatttttcgtagtagttatatagtttatattggcatcactggtcccattaaaaagtaagatagcttttcttcaattaaaggcaagagaattagctcttttaatagctctgttagttattattttatcccctcataacacagtttaaattctgtaaatgactttagtgaccttgcagcttctttaagacaaagggactcttgcaggcaagggattgagttttgggcaggtgatggagagtgaccctctaaactgggaactgtgacgacattcagcttcatgtcttaggagagagtgagataggagccactagaagaatgagatgattcagacaagagattgtaggagattggctttattctgttgacaagatggtaatccgacttattttttggttttttggtgttggtggtttaggaagacaggaacttctccacacccggtagagttcagctgccttttcattagtcagcaagcagtttttcctttctcaaggcagtccacatccagcaaaacatttgattaactggaaagcaataccattctcatgccagtgtacaaattacatgaaagagcatcatttttctagtgtctgaggattggctgcttatggccaattttggcagcaagacgataggattaaaaatagcttgaagatgatctagtcttaaataatatatttcatgatgaactttccttgggaaagtgcatctttctgcctacaagaatcacatgacccctttcaataatttatgtagtagagaaaaacacactatttctcatagagttttcagtcatgtgctgtggtgtgattgtttctggacattcataaaattttatagttaactgaattctcttttctgttttgttgctatttaacgtccattgaaaacatggctttcttttgcgcattctgttactttcagctgtactttctaataagaatggattgccctttttagcaatctttgattgaactggtacatttcagattacttaaatgtcatcaggccacacagcataccaggtaacagaaagccataaattaaaaataaaaaaaaggcaagcaaaattcttgttgttttttcttatctctgttcccagtcctattgcgctatttggagggatgatacgcccactcatgagcgagtgtgtgggtgctgcatgttaacagtggttcttcccacccaacatacctccgcacccttttctaaggtcactcattgtgtcttagcagtagtttagcaaagcagtatctcagcagaagtgcatttgtgctagaaaacaacactgtctttgtagtgtacaagtagaacgttttctttttcccccagagatatattgtatttgagattcaaaggttctgttcaacctttttaaggtaatctaatatcaccttattcaggtataacagtaacttgtcaatctggtcatcctttctgtcaaccacatgtaggagaccactcagtgaatttactccactgtgaattttctctttcatccctcttggtttggcttaatcaaccttaatgtttgatgtctaagcaggattaatgatgaaaatcatccaaggactgacagttattccacagatgtgattgccagtcttacatgagtcctgccttgggttaggttggaggcacggcaaggagagctttgcttctgccctggataaactcacaggctagtgttgcaggcatcttaataaactcgtagttatcatacagcctgataagcatgatcctagactcagagacttagaggaaaaaagcaaataactataagttattttgcatgtacttcagccttggtctaagaacgttatttctgaccatatggctgttcatgtgtgcattaggcctaatttaaacagggccaaaatgtagatactttaaaaaatactgtgtaacgtagacatatgcttaagagaactgaaaggcagggggagttcccttgttaaatattaacccactaagcactatttatgcatactaagaagacttaataaacaccagtctacaatttctaaagcatttcattaattctttttaagtaaaagacaatcaaggctccgattagactgactggaacagggtaatttgaagaactatctttcttaaataactcttgtatgccaaaaaatacaagtaggttttgaaccagagcgggggctcttcctttgagcaggggaaaaaaaagcttctgttttgttttggtttgaggttatattactgttctatttatcaagacacttctacgatgctagttacagaaattcacagtccattgtaacactggcatttgccttcggacttttttgggcttgtggtctgttcgtttaaatggagactgtaaaactttcaaaatgccaacaaagctgttttcacttaaaaacatatttttatagattgtcacttgttgttcttatatatgcccaattctgtatatgctatagcactatttctctgccctccatttgccagacaaaagatacacccatctgtccttcagtgtgaataaggattgaatgattattcctctctcttccaagccatgggactttctcataggtgccaccacccctgtgaccatcccctacctgccttatcattccaccggtgagggacctctcaggtgtagctccttgttaacttccaattagtgatgggtaggatttacctgaagaaaaccgtaatgcgcttagatactagcaaaagggagcagaagtggggagtctaatcaaagtgagaggataaccctcaccccaaacttgctgcaggcagctgggcaggtcaaaattctgtgaccagacactatccttttcctctagtgattataaactttaacctgtgcagagaaaagatagtatctgctggcaaaatttgtacttactttgattcctctagtgcaagattatagtggggttatacctgagacttcaataaatgtttgactaactaaactaaaatagcttagggtaaggactacttccccaaacgcccttttaaacatgtgagaaagggaatctccctgacatactggtatggccatttgtagcaatatactgagagtgacttgggtgattttctggggcgatcaaccacattccatgagcaggttaactgtggaagacacctgcccttgagcatcgcgtttgggccacatgcgtcaatggggaaatttgtgtttccattctgcttcttgttttgccttcacaacttcagggatagaagcgtattccatttttagttaataatcagctctctggggcttccatgtaatgagtcagaaactgatgactgactccactctgctcattatcatgtctcccaaaaacaacccgagaacccactgtgtcaagtgaagctttaatttttcaggggaggttttctccattgagaccaatacatcttttcttgtgacagatccagttaccatatttccttatttttaactgtcgaaaagacagttaagctgcaacagagtatggtgagtttaccaattttaatacttgaagcaccaaacaaaggatcagtgttgcaggctgtctcttcttgactttttccagctctccttagcagataaccaggatgatattttttctgctttacaacatgatgaatgctatatctctatattaactctgaaattgaattgcagccaaatattcctctcagctgcattagaattttctaaaagaacatgagacacataaacttagtcttcttagttcaatgctatatctcagatatattgatatctgatttacaattaaaataggaataaaattaagtacaaattatatcatcagctttaaatattgatttatcttcttgaaaaaaaaaaagcgagtccataaaggatggcagcattggcatttctggatgtaaaatttcagggctatctcctagccatatcctttatggattcctgccagcatctttaaaaacacacacactgaagacacacagagaggttttgaggtattttataacaaaattataagaacagggagacaaagccacttactaaacattaaagtgatagtataagaagaaaatgatttgaagaagtcctaattgagggaaatgagcaattgtccacaaaacttaaccctgggttcccaggaaccggggtagtgatggtcatggagaggggttttagaatctggttatttaggaaaacatgcacactaacttgtttcattgaaaaaaacatttattgaggccctacaccatgcaaagctctatgctaggtgttttagttaagcgaaaaaatgtctaagataacttttgccttcaaggaacttaccaatcagtaggagaccaagacaaggatacaaatcactgtaatcctggacaatgtgtagtagacagagaggcccaacccagctacagtggtatctgaagagtttcatgccggagataatgttgagacaagttttagagaacaggcaggcgatacggggagagggtctttcaggtagtggaaactggaggcgtcaaagcaggcatgaatgcgggaggtgtgtttggggaattgtggagagtctgatttgactggggcatggagaactctcctgagataaatccatagttttgagaacttaccactgcatactaagttgtgaaacttgtatagacagccctccctatctttgggttccacatccatggattcaaccaactttggatcaaaaatatatggggtagggcaggcacagtggcttaggcctgtaatcccagcactgtgggagctcaaggtgggtggatcacttgaagtcaggagttcaagtccagcctggccaacatggtgaaaccctttctctactaaaaatagaaaaattagccaggtgtggtggtgggcgcctgtaatcccagctactcgggaggctgaggcaggagaattgcttgaacccaggaggcggaggttgcagtgagccgagatcgtgtcactgcactccagcctaggggacagagcgagactctgtctcaaaaaataaataaataaacaaacaaataaataaaataaagtatataggaggatgtgcatatgcaagtactactcatttaatatcagggacttgagcatcttcagattttggtatccactgggggttcctagagccaatcccctgaggttactgaaggatggctgcgtttaactgtaccagggatgttgaaaggatgttgcaaaggttctcagacaaggcaggatgtgtgcgtgggaggaagattgacagtgactgagcctggacgggggagaccaggtatgaggtctgaagcacctggaacagaaaggacaggacagatgtgggcacactgcacgtgtagaatcaaaggactgacagcaggtcgaatgtgaggaatgagggagggaaagaatcaggactcaagtgccatcctggctgcctcaaaaaatgatactgtcttccagagggaaaggaaagataacaacagttactgctttgtggcgtacatgtgatgaatttcattttggacattccagtaggatatccaagtggaaatgcccagtaagccttagacataaggatctggatctcaagagaaaaattgaggttgaaccataatatgtctttcccctcgaatcatgtaggtttctcttttgccttctttcattgccctaagtggtcctaaatgctactgctgatgctgtcttagtttgcgactgttgtttgcaccccaccttttcccaaaggtaatctgtagacttgcatggattgggttaaggtggttaacctgcagctttgctgttcaaagcttggcttcccactaccagtttgccaacttaatgagtacttcaacttgagtcaaattagtattgttccaaatatcctaatagtatcctctatgtgtgactctaggtcttacaaaatcaaggtgtcctttctcattgagacttccttattaataaaatatttcttctattaaattcaacctggcaccaagcatagtaggtaataggcacacacaatgactgtttattgaatgaatgaataaaatgattatgttagggcattctgagcaattcatcctaagcagctaattttctcctacttcttttattatagtgtgtgtttgtgtgtgtgtgtgtgtgtgtctgaaatgtcccatcctacaggttcattaatatttaatagaaatgaaagaagaaaaatacctattaagtgttttgatttcatccttttcattgaattgaaaaagtatatcatttattcctgaagagaaatctagattttgctctatattaaacatttgacatttattggtccttaatgctaatatagataccagcctgctggttgtcacattctatctgtttatacgaaggttgtagacacacagtgtatgtacatatgcctagttgctctcattccttttgtttcacatctcaagcctaacccagactgaaaaggttttgaaggctgagattattcatcaccccatcattatagaaagcagggctggcccaaggttctcacagtgggagcaaggtggattttaactctgatcagtgttgtagctcaaatataaaaagaactgcagcacaaaagtcacaaggataaatgatcccctcgttcttctcccataaaaataagcagccaattgaaggtggaagtcagtacagtgcggcattcccagaggcgacagaacctaagattccatttctaaagacactgctcaacaagaagaccacctgggatgtcttacataaaaccattggcctggcagcttttggctgagttctctattctggttcaagccagcatcacagcctatctgtggttttaacaactgatggaatttgtattttgagaaccctcatccgttagcatgaagcaaactcaaagcattgttgctcatcagttgtcatctgtttgagaaagattttgatttgtttacttgtagtgaagcttgaccatacttctccaggggctttttaaaaagatgaatgtgtcagcttgtagatttgtccccatgaatgaaaccacaagcaaattctcttctctcttccagcctcccttcctccctcttgtttcttcagtggccatctgtgcattatgttcccattgccaggccctcttcaagcagcttatctatgagtgaattcagaaacttcaaattataaaggacacccagataattggcctgttctccaaagtatctgtcccctgtgctgctgccagattccttcttaatgaatacatccagtgacagtgggattcttgagcttgtccgtatctgtgagaaaatgagctctcctgctttgtaacagcttgtggctcagggaaaaaaatgacagccattgcacaagtttcctttgaatgtagttttctttcccataaatgatactttgagaatacagttaaggggttattagttttctatttcatgcttggcctgtgtgtgagaataacacaagctgtcactgcaaatcagtagctaaaaatgctttgtctggttaatgtgaacatttaatatttggctcaattaaaaattaaccgatgaaagtacatgtcattggaatttgaaaataccttttgtacggaatacttaaagggcatcacccatgactaaaccagtgcttttaaaatatggagaatatggggaaatttaatatgagttgggatacttgactcttttttaaaacctctctacctgtttggcacaacagggtattgataaagagtgggctcattgttatggcaaaggattcacttgcatctctgtgtttttaagtgggtaattgtttttttgcactcagtcacatgattaaagcagacagaacaagagatcagttattcatttataccatacttttaaaaaaatattgagccaggccctggggaagtgggaagtgagagccagagcggcgtggctgatagtctagggcagtgctatccaatcttttggcttccctgggccacattggaagaagaagaattgtcttgggccacacgtaaaatacgctaacacgaatgatagctgatgagctaaaaaaaaaaaaaaagcacaaaaaaacctcataatattttaagaaagtttacaaatgtgtgttgggctgtattcaaagcctgccatggattggacaagcttggtctgggggagtgaagaccattcaacatcagctgcaggagagcatgtttaaagctatgagaagagatgcagcaatagtggtggcatttattggagtcaaggaagtcttcccaggaaggggactgaagcctgaaggatgagcaggaatcaatgtagtgaagtgggtgggaggaaccaagtgtggccccaggcagaacttcaggaacaaaggccagaggcaagcggccacatggtggactgcaggagctgaggagttcagcctggctggagtggagagtgcaagtgggtgggtcagaaagatgatgctagaggtggcccaccctggaagagtttgtttcagatacgtcaccctgactccactccagaccgttaatgagacgggggagaaatcagtgaccagatagaaggctctttcagcaaacgggcaagagatcaagtgcctgacctagaggaatggtagtgggaacggcaagaaattgctagctttgcacaatgattaggactagagtggagagattttttggaagaggtaatgattgactgaatgctttagaacatggctcagttcttcctcagctttgctggtctttctgtacaacttggaaagaatgtggtcattgttctggttatatataaatgcttttttgtgttttttgtttgtttgtttatttgtttgtttttggagataaggtcttgctctgttgcccaggctggagtgcagtggcaccatatcggttcactgctgcctcgaactccggggctcaagtgatcctcccacctcagtctcctgagtagctgggactacaggtgcatgccaccacacctagataatgtctgtcttatctttttttgcgacaggatctcactttgttgcccaggctggtcacaaactcctggcttcaagcaatcctcctgcctccgcctcccaaagtactgggattacaggcatgggtcacctcacctgaccttatacaaatatatattttttcttatttcacttttaaaaaattgtctggttaaaaactatttttgttagaattcaccgtgtgataaatctttattaactatcagttaataaaagtatatttgaggaaagaattcaattatgaaaggcagttttcatagaatttttttccgggtgaaaaaaatgacagtggtttcttgcctttacgtaggattttaaagtttctaaaaaaaaattccatatctgttggcccatttgatcttcacaacaaccctaagcaaggcagatattgtattccaacttctccctactttcctccccacacacactgttagttatttgtttatgcccatgtaaagaagaaagttcgcccaacaaaggtgtgtacgagccaataagcacaggaagagctgatattcattccctgggttgggaatcccgtagatatttctttatcctgtgctgcttctctggatatgtgttcataaagacacaagattgcttagtagagactgaaatatattgcattttgaaaactagtatactctactgctttctgtgtcaaaaatgttcagggaaattggaatgcagtcttttgtttctggttactttcccttcttcgattcagcctttgcagcgtttctcatgcttgcagcagagggggatctagctgcttccatttggtgcctaccatcagctcaagaccctgtgaggatgcgcttatgagccaggcgggcttggacatgagctgaagggacagtagtaggattgacgtgcgaggtctctaacacttgaaggccctgtaaaacagcccctttcaacaggggccaattggaattagatgaacatgtgtgactgtttttgcttgttgacacctgactagcaacggtgttatgttagcatgctgtttgctgcctttatttctttgaattcctcagagtccttatttattattttcaaaggttgtaattagctttaatcggaagtgcccgtaagtgtagtcctgtaaatgttgctcttccatctttcttttttcttttcccaagaaaatgccgcattggaccatcaggaaaaataactaatgggtactaggcttgatacgtgggtggatgaaataatctgtataacaacatccaacaagtttacctatgtgacaaacctgtacatgtgcccctgaacttaaaagtttaaaaaatttaaaaaggatgtgaaacaaaaaaattaaaagaacaaacactaataaatatgaagaagtccttcagagtctttaaatttgctcatagagcattgactgagacactatctcctttagtaactaaataaaattaaaaaaataacactgggctcctctttttaggtgaccaaaaatatttggtacatgttttttgaatgttgaaaatggtggagccttcatcagtagggtttccgcagtagtaaagggcatgttactgcaagttcattcaatcaacaaatatttataaatatttgtttactgtaaagagcctactctgggccaatcattgttctaggggctggagctataacagaaaacatgacaggttaagaactctcccatctcttgtgaatcccacattgtgaggaagtcagaaaagtaaacaacttaaaaattaacaatataacataagggccacaaagtaatgaaaacagggcaatgcagtgcaagggtgctgatgggacaatattaacttcttccttggtctttgagatttttcaagcagtactacaagtttacacagaggagatttaatgggtttttcttcattaatagttgaaaacagtgttgtaccttaaaaataataaatgtattagtataatatagcccttacatcagtttaaaatgagttaccatgaacaatatgaacttaaagagacttttactatttttggctaaaatgtttagcgcaatcttttccttacctactcatccttctcatttccccatttccatttatgacaacattggtcattggcctcagtcaccgaaagtcaggaggaaggaaggaaatgaatatttattgaaccccaatatgtgccagaccctggatttaacacttttagggataggagattatttaacctcaataacctctccctgagggcaggaagtggatttatagatgcggaaacagaggttctgcaaagtcaattgactttgcctggtaagaggcaaaaccagcatcctttatttaggcaatccaagtgatgttcatgtcctctggaacttaaatttttaaaacaaaaatttaaacagaaacatattacaaaagaacaactttatgcatgtgaccttttgggttctttaggaagccagttagtcatctttattttaataactagaaggtgaaatctttcctacaacatgtaattttaagttctctcatagttaaaaaataaatgaaacaactttttttttctgtctcccttttgactcctagagtctgtttaaatagcctttgaaaaataagtactaatcactggttcctaccaagaccagacacctgattcagaagctcttacaggggtcagagtgtgcgttggaaaaacaaacccacagtgccttcctggttccagagaaatgatctcactgtcaaattgtaacctgcctaataccttaataaaaaggtggggaaagtctgcggttttacctctggtatgatccttttcccttcactctttttattttaggcatgaccttagtgttttttttcttctagagtccagaggtggaatgacatgtcactcaggtttacaagatgaggatgtatctgtttttatattcagctgtacattttattctacttaaaaacaaacccaccttcagcaaccagggcgtatcaagggagagttatttccatccccctcagtttaatttggatacatttggcccagaacagcacagtgtttccataataacatttgaacaggatgcccttgtgttatttgcagggctaagggagtttcagcatgggccaggaaactactttcttaaaagaaacttaaacgcgaaattctgacaagataggaaactcttactgcatccttactaaacctctttttcccccctactttctcatttatttatatatctcttgtgttatgaaacatatataggttgaatatttaactcactctgaattcatgtgcagaataagtcactcttcagaaggacaaaaataatgttttaagtggtttgtttaataaagcacatattaaaaaatttcaattcaacatcttccctgggcacaacatgttatgactttttagagtagagcttcgtggtatttcataaggaagccaaaaaggaagggaaattattattcgggcagagggacaatagtgacctttcattaagcaagacagagttcaccatcaggctccccaaaccccaggctctgtgttagttgaactgaacaagccaccaactatttcctctctctctttctctctttctctctcttttttttttttttgagaaggagttttgctcttgttgcccaggctggagtgcagtggtgcagtcccggctcactgcaacctcagcctcccgagtagctgggattacaggcgcctgccagcacgcctagctcatttttttgtattttttttagtagagactggttttcatcatgttggccaggctggtctcgaactcctgacctcagatgatccacctgcctcggcctccctcccaaagtgctgggattacaggcgtgagccaccacacctggcctcctctcttttatagaccagactactttaaaaatattcgtccaatattacctaaaatatttcatttataagacataacccaacattgtaatatttaaaagactgcattatgtagtttttacatatccttaagatcctaatgaattcagataatcagtatttttgttcttttaacagctttacatgtgacctcttagttctagagtttgatctcaggagaagggaagagtagatttggattctgtgccgtggacaggcgcactggtttcccgtgtgaaaaggacaaagccccgccccttctggagctcagttctctttgggattattcataatgttctccaagaagctcggagtgcctgtttgtcgccagtactgtaatttgtgagtaaaagatctttatgattgcaaaatacattagcgccttcggagatcattgtttcttgatgacggtgtgaatcacaactaggaactaggaagtcatttcagccccttctgtgcagagggatgtcatgaagtacatatgctaaagttcatacccattgctcataagagctcagccaaccttctcaaccagttcatgtaaaaatatatctgtataaatatgcatacgtatgtatgtatgtggtgtgtgtgtgagttaagatatacataaaatttacgttttccaccaattttaaatgtatagttcagtggctttcagcacatttactttgttacataaaccattattatgtaagccattactgacatctgtttccagaacttgttcatcattccaaatggaaactctacccattaaactataactccctgtttctttttctccccagtcctaggtagccactattctattttctgtctctataaatttgactcttcgaggaagaatttgattcttcccataagtggaatcagacaatatttgtccttttgtgtctagcttgttttatctaacatattttcagagttcacccatgtcatggcatgcatcagaatttcattcctttttaaggctgaataatattccataccatttgcttttttaaaagtccattttctcaaaaaattggttgtcatttccactccccacccagccaatagaaacagcaaatatattaaattagaattgacctgacagaggaggtaatggaggcctgtaaattattcaaagaattattttagagtctgacagcaaggaagaagacaaaaatgctcttaaaaccagctcaggagtctctgaggctcttctgcgtggggcaggcagtcacaaagatctctacggctcctggagttctcgctggatcgtagcacaggacaatcttagtgattcctaatgatgccactgagtcatcaagacagagttattttctgtaggaagagtcaaagagttcagggaaagtgagtagtaagttacagaaatatctccattccaaatggttaaaattttttaaaagtttaggcttcagtcatctgaaaaatttacttgtgtgaaatgattcagtccagactgtagtgaaagagaggaatcccagcaatatcaaagtaaaatacacacacacacacacacacacacacagagagagagagagaaggagcacaagatctctttcttttttgtttttttctctttttttttgaacaaactcttacatatccttcaagcccaggccaaatggcaccttctctgtgaatgtgtgtgtgttaaataggcagagagaccttcaggggcgtttgctgacttctttcattctttttcatctcctacctccctttctagagtagagaattagtaggaacttgactcaagtggacggggatgtaatttctagggggagtttttgctgtcttactgcatctaaattattctgtctgtgcataaattaagttgtacacatatttagaagagccacctcccccactgcaggatgcatagagtggtttttgtgaggagctgctttgcagcctcaactctgcctcctgacttcattttgaaaccactgtacaataaaacgtggtcatttgtttgttccacattctttgtgcctactgggtttctggacatgatctctggccttgggggggacagtctcctggggaaacagacacacaaacagatctattacagtccagtgagttttttcctgggaaagttaaggatggtttcacagagaaggtgccgtttggcctgggcttgaaggatacataagagtttgttcaaaaaaaaaaagaaaaagaaaaaaaaaaagcaagagatcttgctctctggagaatgtgaaagggtaccatatgcaaataagcagagtaattgaagggcctgccaagcttgggaatggcaaaaaggccagagtgaccagaagagaggcagttggggatggaatggaaggggatgaagcgggaagatagtggaggctcgctctccaaggctctatgtgccccactaaggagtttgattagacctttcctgcagtggaatgccagtaaaaggtttctagcaggatactaagtgacatggctggatttttttgttgatgaaaatactgctggtagcagtgtgttggtggcactgagggcagcaaggaggccagatgggaaggtggggtcaggtgcccaagtgaaggtgctgggcagctgccccaaggcatgggcagtaggaactcccaggatgggactacctgaaaaggtgttctaaggtagaatcaacaagattgtgcacagttgatcatcgctgaacactcagtgcttagcgcaaggcaagcacataatagatgctcagtaatattgactaaatgaatgaatgcacaggcagctgggtacacatgacaagcagtacaagcaagtgttaaagtgacaccccagctatactcacaacagtgataaagcagaggttcacatggcctgtactttgcccaactctttctaaacgttctatcactattcgtgtatttctttcttacaacagtactgggaggtggtggtgtttttatccttgtcttgcagatgagaacactgaggcttgcagagggggacccattacagctgtttgggtggctgggctggaatttgaacccaggcggttttggagtacttggagcccttaattctgttgctctgctgccgcccagcttttgagccttccaggaagctgctgctttcaaggccccagaagtgatgactcggggcaaacctaagtggtggcaggatgcagagaagcctgtttaggaaaccatttatctcacgtagacatgccatctgagatgaccttagtagaaataacaatggcaatgataacagctccgcagccttttccctggcataagaaactagttttgtaatgaaaatggaatttctctggggaatagtcctagaaagagataggtagttgagataaaaataacaaaatataaaatagcattgcattgttttctgtgtatttttccttccacctttgtccttctctgttgtgtaatttaccttgttcccttggccatgggtaggttgggcatcactgtgatttgacttttgtcctttgtcccaaagaaagggatgagtgtgtgcatttagaggtagctatttgcaccttgcctggagcttgccatcaacatagctagctaaaaggaggagaggcccttgagggtaaaccttgctttaggagtcgaagcccttggctttctggaatgaagggtggtgagtttggtttcccagatggcccatgggccagaatctgagctccttggcattcaggtgtgtgtgccgttctggatcattacaaccacgactgagctgtgttttcaagccataggtcagagtcgtgtaaaataaactcttgtcataacaaaggatgcggcagccagattgcagctcggagttccttcactcatttaccccagaggacactgattttcatgtcagcatagggaagagattccatttgtctgccgattctaattgggggtctgtcttgctcgaccaccctggtaaatggtgataaatactggtggccatagcagcacagagagagagtgccggcctggaaacccagccaagctctcttggctccaattttatgcaaatttgcctaatagaatgcaaatgatttcacaggaatacggatcccagggacacgtgctcatctgttttcagcagtgttcctgggcttttagaagcagccacttgagaggccaggcaagtccacagagaggcaggttaaaggtggcttgcgaaggaatggctcaccccatcagccgatgccacgcctggaatttcattatgagcagcggctttccctttggcagtctgcgagccaagacttctgtgttttgggaacaggaaaaggtcaacacagactaatgctttttcaaaaagtcctttattcttcctcttattctacagattttctgcgatcacagtatatatccaaacatttactcatcctacacatcttgattgggcatttagtcactaaaaggcactgtgctaggcactgagaaaaggctgctctgtgccaccaaggtgtgacaccataacattgtgtctaaaatctactcctgccctctccagtgccgtggctgtggctaccaggctcacgtaatgtggccaatctgaattgagatgcgattggagtgtaaaatacacaccaggtttactggatttcaaagatgtagtatgaataaatgaatgcaaaatattttatcaataatttttataagaattttgtgttgaagtgatagtattttggatgtattagtttaataaaatatactaaacgtgaccactaaaaatttaaaattacatatgtggttcccattatatttctttctttcttttttttttgagacagagtttcgctgtgtcgcccaggctggagtgcagtggcgtgatcttggctcactgcaacctccgcctccagggttcatgccattctcctgcctcagcctcccaagcagctgggactacaggcgcccgccaccatccccagctaaattttttgtatttttagtagagacagggtttcaccgtgttaaccaagatggtctcaatctcctgaactcgtggtccgcccgcctcggcctcccaaagtgctgggattacaggcgtgagccaccgtgcggggccggttcccattatatttctattggacagcactggtctagactgctaaccatttattgcacaatgtggtcacctttttattcccatagttggatattactatataggaggatagaaagacctttccttttttcttcaatgagctacagttgtgtagccctttttaaagttcattcatattcatgttcttgtggctcccattgtcagtctgctgagctgggcagggaaggcctcaccatacttttacaggtgagcatactgaagtgtaagaggtcactgttgccagcctgccctaagagttaagccaagaataaaacttcagtagtttctgggtggacgtggtggctcatgcctgtaatccccgcactgtgggagaccgaggctggaggatcacttgagcccaggtgttcaagactagcttgagcaacttagcaaaaccctgcctctacaaaacacaaaacaattaagccaatcatggtggcgtgtgcctgtagtttcagctgcttgggaggctgagatgggaggatcccttgaggctgagatgggaggttgaggctgcagtgagccatgattgtgccactccactccagcctggatgacagagtgagaccttgtctcaaaaaaaaggacttcagtagtttctaactcttgccaggctggaccattacagctgggttgggaaggttggaaatagaactttcgacttctattctagtgtctattaaaaatacactaaaatttatgcatggaaatatttacttttatttctgtaccaaagatgatagaacacagcccacttagaagtatttctgtgtgcatgtgtatgtaaatacacacaaacatgctctgcagctggctaataaaacacagtaatcaaagcctatagtggatattcagtgtaaaggtaagacttgctgaattttgaggcccattggggaagggcagggtcagggtgagacaagcatgtggtcacaaccagggggcgttttcttctgttgggagtcaactactgttagggaaaattcctggcagcgtggagcaaggttggtggatcccacctgtcagaaaatcctgagactgggtttagtccttgagggatggaaggacaaggcaggtaccctggaccaaagaggcaagggatccaacccaggtagtcacccagcattggggatggcttaggaaaaaggttggggaggtgcagttctaaggaagaagagagaattgatcaagaagaggaggtggatatgggtgagagctgtgtagttgttgaggacatttagggcaacgggccttgggttgtattcttctgacccgccaggcacttgctgtttgggcatgtcatatactcttctgagctttcatttcttcatctgcaaatggggaagttgagttacagggtccctcactaacattttgtgattctatgagtttcgaaggccagagaatcagcaagaattgtattaataagctatcaatgatggtataaaggttttgcttctcactgctgctctttctgctgtctgatgtgctgggggcactgaggtctatggcaaatgagatcattggcctggaccattcacttggcccttgacagacacaagttgggtctaggatttctttgcaactatagccaatacatacatattgtagtataatatctaaaaacatttatacctacttgtctttcttggttctctctgttctccttgtccctacactttctatgaattataataataataataattattactattattatctttttttgagatggagtctcgctctgtctcccaggctggaatgcagtggcacaatctcggctcactgcaacctctgcctcccaggttcaagcagttctctgccccagcctcctgagtagctgggactataggcactcgccaccatgcctggctaatttttttttttttttttggtattttcagtagagatgggggtttcaccgtcttggccaggctggtcttgacctcgtgatccacccaccttggcctcccaaagttctgggattacaggtgtaagccaccgaactcagccaaattataattatttcttatctcctatcttcagagtctagtgttacacagatagtaattctccaacattgctcatatgatttagtaaatcactgcatgttctcggtttagaaggattttccctgtcttataccttctatgaattaaaaagcttttggaccatggatgaatgacataagaatttaactacttttttttttcttttcttttgaggcggattctcactctgtcgcccaggctggagtgcagtggtgtgatcttggctcactgcaacctcagcctcccgggttcaagtgattctcctgcctcagcctcctgagtagctggaactacaggtgtgtgccaccacacccagctaattttttgtatttttagtagagacagggtttcaccatgttggtcaggctagtcttgaattcctgaccgcaaatgatctaccggcctcggcctcccaaagtgcagggattacaggtgtgagccaccctgcccagcctactttttctttttaaagaatttattttaattgggtttcgtaaatgcagggatacaaaagctattggatcttgagatagctttgtattttgtagagaatcatcccaggagcacattccctcactgagggttccagccacctcttccgcctcattatactttgcttagcaccgagaagtctggcatcgtttctgttggaatgaaaagattggcagagctgccctggacaacagcactgcaaaacactgtggcagaaggtttggtctacataccaaggcagccaaagtattaattgcattctctgtgatcacaaaataaggcgctgaattattctcttcatgttttaagaatgacaggcttttgctctgccagctccaagcatagtgcatcacatggaaaggagatgctagatttgcaaaaaaaaaaagagaaaaaaagcacaggagtgaagatctctggtagccagctgcttcctaaaaaagatttaaagctgaactgttgcatgagaggtacctataaaagatcaggagccgggtgaggaagtgtttccataaatttacatactctgttaaaacatgttctattttggaatcttactttagattttgaaatgggacttttcacgttgctggctatactttgatcccattttcctttgttttggtgtatttactggagaaaactggttatgatatttctatatgtacttgtctccccccagccccagaacaagcaccatatgtgagtattccagatatccaaggtcctctggacaccccagtctcttccacaaagctgcctcctcagagcctgctgtcccgtcttctaggaatgtacccatttgaaaacccacactcacactaccacaacacatacactgtttcttgctggtcgttcctttaatctcagtggaagatatctcatagagaactgttggtgattgcttaacttggttgggaggaaaatagatcaagcaggtgacaacctgcatattggggattttcctatgctgaaaattgttattctgttgcagcactccaccctcccttcacagccccaaaaaagagaagtacgagtgctgctgatgttcagggtttgaatatgttttggtttaagatgttcagtggaattagagagaatttcatcctgggcagtgcagtcaggctggaggagtattttggtttcatattactaaaccttgttttcccatcccagctgcttgtgtgctatcttggggccactgagaacctggctgggctctgcggggtgggagtgttgtcccggggctgagtccagccaggggtgaggtcgtcttggtgcacatcttgcacgttgcatgaagctcagagcccagcttggctcttgtgaacttcccctgtggggacacaccctccaaccaaagtgagggtccagcggccaccaggttgtgacatgagagccgtcgctattattactcatcacctgcagcagcaggaagggtgcccagaccacagaaatcttctgtctctgggcccgtgcctactgcagttggcagagagctcctgagctccttccctaatgcgtggtgggagagcgctttcttcagcactttcttcacagggtttcctgcagtgggagtcttcctgatgctctttacccccatacttatttcactcccagaatcaaggagaactgttaagccattcctcagtacgatgtgtcatggctgaagaaccattcattcaagacattggtgaagagggttctttcattgcctttcttcaacgacggtttatttgctgtccatttgctgagcacctgggtggtgccaacatgaacccatttccttctgtgcgcaagccccccctttctattaccagagtgcagatcccagctagcatggtacgtgtgagtgcgctgtataaagtctggaaccacaattagaaaggaaagcctttctaaaggtattttgtcttgatattcattaacctattagattgccattctttcatatctaagatgatcataacatgtctcatccaagctgagacacttgttattaatcattattctgggacaatagggtaggccaggatggtcccaggcaagctgatgtctagagtaataaccctgcacatatgaatcttttgaaggattgggcatgatttttttttttttttttttttgcactggggttggctggggctaggagtttgtgatgaatccttccagtatttttctgaaaaccagtgaactattttgtaggtttctgtgtcgttagaaacatgcaaacctatccactaaaaccactccagttgatctattaagtcattcgttaggtcttacctggactctcttcactgtcactatcatgatctgtccacatcactggccctttctcctatcacctagctctcctgtgagcccagcactgatataaagtggtttctagtcttcttggactctcaatttaacttgcttcccatgggaatcttctaactgtttccccaaaccaccttgtagacattcatttctttgtttaggattctaagaataggaaagagagacataagctagattccattcctgtttcagtaagattatctttccaacacaagaaaggaatacatctaaaaaattctttcagcattttttcccgctttattgagaaaaaaaaaaaaagaaatactcatgagtactccagggcctcggttgatagtgtgacaaaaatagttccaactaaactaagtaactcaaggctatttgctttatctttgtactctttcatgtgttcccgagtcttttacagattgggatggtacactttggtttaaattgcaaactcttgtatttaacttcctctgaatgattcaggacggggctgtggacctgttgacacttgatgagtattggtttctagtgcaaatgatgacctgttgaagggcatcaggcatatctgaaggtagctgtccaactaggtcacgttcccatcaacactgtattgtgaatctttggtaagaagagtgataactttttgcaaaatgtagtttttaaaaataaccgtgaacttcagtgtccccagtcaaaataataattcatttggggaacaatttagagattctttcgacaaatacagagaaatggaagccaatcatatgcgcctcaagcatttgatattggaagaaaatcagcatctactaagtaactcttgtgaaaaccttatccattttttgcttttttgcacttttcaatctgcagcataaattaggccacaggaaaaggatggcgtaccttcaaagagccagttgggttggctgtgttctttctattcgtggaaaacagctgtgggtgccgggtgttgaagtcaggcttttgttccatgctaaggtaggaaggtttgttcttgagacctatcactcttctgtggaggaggagttcacagatggtgagccgctttatcaccatctcggaggcttttgaaatatgttgataatgacctgggaaagagggccgagtgggatgagggtgggagtaggaaagaaacattcggcccacacagtgttcatatcttctcttgtttttgtatctgtggcaactgcagattaaatgaattaggttattcttttccattgccttctaccaaatagaagtacttatttaagccttgcagatttttttcctgctgagtgaagcctgaactgagcccatgaaaggtgatctctccaaagcaagggctcctgtttccttccttccatcctgctatctcattcaagtgaaattcctgccatggcatttatcctgagctttgtcacacaggattactgtgatggtccttactatgaatggagtgttaaggtgttttctttagctcgagataaaaaccagttttaggaatgaattctcttttgctgtgaaaaacatgttctaagggaacaaacctcgcctcatttccatttttacattgagcaaatggttgggaagttcctttaatactgtctgtcttgactcattgtctcactttttttttcctgattctcttgtgcgggacctttttcatccccacagcttccgtatcgtctgtatgcagctgattctcaaatgggtatttctgcaaattccagttctgcttatatactatttcctgatgaccctttctatctggacttcctgttggcagttcaaattaaacacataatcaaaatatttaatccaagactaaactcatcgtcatccctccaaaaccttccttggactcaacagtttctcttcctgctctcatcactattccgatcacccaggctcaaaacctagggtgcattcttccagcttctgctcaggtttttgagcccagcatccttcactgccctccattcctccctcactggtcttgctgccaccaccttcttaactcttccctaggggaattcattcacctgctccagtttctccgcactccagtttatcttatactttgtgatgatttaattaaaattcttccctgattgtttttcttcttgaggtggagtctcgctctgtcacccagctggagtacagtgggaccatcttggctcactgcaacctccgcctcccaggctcaagtgattctcctgcctcagcctttcaagtagctaggattacaggcatgcaccaccatgcctggctaatttttgtatttttagtagaggcggggtttcaccatgttggccaggctggtcttgaactcctgacctcaagtgatccacctgccttggcctcctcgagggctggggttataggcatgagccacccttttttttattttaaggctcctcttttcctaggtaagtcttcattttcctttatccagctgttcaaattcctctctccatctttcactgcaacctatgtgacattttcttcatcattccctgctactccttagcaagattgctatgctctgaacccgccctgccttctctgttctggggatctttttcctgctgtttttacatcccagagtattctgttcccatcagaattctccatcccttaaggcccagatctgatctcaccttcaggatgacagtatccctgttgggagtgaccccgctgatttctaaatctttaccaccttttcagcctttttctttttttttgtgccatttttccaggccttgtcacatgctctttgatattactttgatatacaaatgtttgctatacttttccttcttcctcttccaggttataaacatgttgaggcccggggctgttttctaagttgttattttaggcttgtgtatatccaccaccatgccttaaaaaaaggcctcacattagtaagagctcagtaacatttgctgaatggatgaatgaagtatggtggctttgctatctcttactttacttgttcacttctctcctagcttcattcattcattcattcaacaattacatattgagagcctattatgtgccaggcactgtgctacgcatgtaggtttatcagcaagcaaaacaagatccctgcctaaatgtgccagcattctagattcttccttagactcaccatctttgcattcactttactcagctcttaaagaaacagtagacagttattgtaaatactattagctttatatttatgttgttcttctgtgattaaactttgctgccaagaacattatgctttcttggtagtttgcaacttgagtttctgattcttaaaattggttgcatatcccaatggctgtgatggtgttgaaaactctacttcttttctccccttgactgctgaaccaaatcattttccaagttgctctgaaatatggacaaaagactccttgatttcagccctatgtgcagcatggaaactttcactaggctgtgcctactgactaatagcaagtcaatgcccatcttcccttggttgcttgctaaatattctaaaacgaaaacaaaacagcagtgaattatagcctagcatcagtaagaatggaaaacaactgcttttcaaagcttgatttgtattgtttttaataaggaaggaaaagctttgttatataaacacatgaaaatatggtagtgttcgtggcaagtatgttaatggataatgtgcctaaaatctttgctgggtcagtgtcattccctctttgtgatgctgaaggaaagtcacaaaacaaaaacaactcagaagaagctaatgtgtcatcttcatgtagggatctgtattcaaagttctttttcattgtagctgtaatgaaacagtatttgtggaaagatattgcactcaatgccaaaacccaacaattttgttttcaaattcctaaaaactaaaaaaagaaatcttggtgacataaatgttccaaaatcaaaatgtccaaaatgaactcatcaacttcctcctctcgcctgctcatctatgtctgttctgtctgcttaatgatatcactgtccacccagacagagccccaaactcttaaatcattttcaacttggttttctcatctgtgagatagagctttcctggatcatctcttaagattctttccagccctgaaagtctgcatatctgagttcttcactcatactccccacatatctgaatcctgcttctaaaagtctctcttccctagatctctggtttttaggtttttaaaattattttattatttttttatcctgctgctgctgctgctctaattcaacctctcattccttcttgcatatgctgtaacctcctagccagtcttcctgtcatttcaaaaattattcttaagtttacctacagtaaaattcatcatttttgtgtagctttgtgggttttgataaatgaacagagaggtaaccactactctaatcagtatacagaacaggtcagtcaccccccaaacatatttcatgatgagagtttgtactcaaactgcccgccaccccctaacccttagccctggcaacttctcttctcttctatatccctagagttttgtattttccaaaatgtcatagattggtatccttctctttcagcacctgttcccagcccatccatcctcttcgtcaatgccatttatcttcctaaaacatctctgttgagcaccttgagaaacacttagtttctccaagcttcagtttccttgttagaatgtgacccagccagagtataaaataaggagcatacagaattctaatactttctaaggaggttggttcctgaggaggacccttcatcttgctaactggggcaactgatgggcagatcagagaagcaggaagtcactctgagtaagaaatggtggcctagagctcttgtgagaaaagggatccaagaagggggtagtagagagagaagtgagagacggagaaaagagaacaactgccacaagaagcaaaacgctggagagggacagatgtctacagaagatgttttgggacagttttgctgttgaatgagtgccagtatccttccatagtggcctcgggagacctgtagttcagacccgtgttgtaggaggtgtcttttgaatgggtcttattttgaggagggacccaggagacccagatctgcaatggggataatgacatctgctccatgcaatcatcatgtggggatcatggggtagcaagataggaccctgcctggcagagattgggcaccaaggactcccttcccaccatcctgtgccatctctgccttctctccttacttcttgcctctcacctggaaactgccgcaaaccaaatcctcctacctccccttcaatgaccttcagaatgccagccctgaaggttggctcagaggtcattgtataccaagctacagagtttggtgtacagctgaccttcagggctggcaccagcccactttccagtctacctcccattaaagttctctgtcctccttactttctgctcccaatcctcgcccctactcctgccctaatcttacgtcccagctacgttcaactcctttgttgaaccctcctgcctccccttcaatgaaaattaacctatcctttgtctacattcatttcatgtttattcattttgtgtctacatccattttctgtgtatatatacaataggttttgtatcataattattcatgtctgtttggacacccctgcccccaactgtgtaaaaggtgctcaattcatatttggttaaatgaaatgaattcctaaataatcacagcaagtttgaacctagtgaaggaagtgttaaggcatttcttttacattatgctctcattttaatgtacaagtagcatgccagctatggggcaggttttactcttccagatttcttgtggttgtcaatgcatcaggcagcctgtttccaaacagctgccatatggccaaagctcctcaagtgacccttttatgtgtataagagcaggacatagttcagatatacccaggagaagtaagggcattgaaaacctcccaggctgctgttgcagaaaggacagggagaatgccactacctggaggtgggaaactggacgttgctatacctgcccctccatcaccatcacatagtttgtgtgctgtcaaatttaagttgccaacacaagccatggaccacaaagacatgcttgctaaatcaagttgagtgagatgcacttctagtactttccaaacccatgctgagatgcagaacccccagccccatgcagacagatttgccctgcatggaaacggtgcaccctctcccgctacacactcagagatgagagatgagcctgtttgtgaaaccaaactcaggattctgtttttgtgtaagaaccgtaccacatggctgacatatgttcagtccatggctggcagaagcctcctgaacacatcccccatccagtacctccccggcagtgacccatctcatatttgcatatgttcccctgtcacaagattgtggggagggtgcagtttgcagctgactccttacctagctacagctccaactaagggcgtgcattcttggggagatgttgggagcatcacaaggtccccttccgttcccagaactcagtttcagaggtcagccagaaagagaattccagaggtcagccagagagagaaggtagcaaggacagagcccctactgacatttttcttcccacccatcccatctccagggcaatggtcttcagcagggaacaacgggccctcattccctgccaggggagctgagtacacacaaactgctggatgggcgagaagttcccccagtgatctttatttttccgtttagaaagaatccttattccagccccttctctccagctgctgcgtgtgagcctgtctctgtctcttgggtggtgcagctgcaggtgagccagctgtgggcggccctgaaggacagcgaggtagggagcctggttgtgaggtctctgctccctggggatgctctgcagccttttgcctgcagcaagtctgaaaccttccatgcctgactccccctttccatttttttcctggcgtctgcccttgctggagtggagcatggtgggagccagcccctggagccttccaggattctcacagtctgtagccagagctgtgtaggcctgacctgggcccagcgggaggaggattttgaataaaaaccagtggttcctctccgtccaaaccccccacccctggaatacattgcaaccaaatatttactcaaggttcccccttgccatttaaaaataagatgcttcacctactagcctggcggtgttctctgctctgaaattttatgctcttgagtcatacatttgaaggtagctttttttggatttaaaatttcaaactaatgaagttgtttaaagtaccctgtcgagtgctgggagctgcttaagcattgccacataagcactgcagaggctgggtctggcgcatacatgccaggcaaagtctgccttgtttcaaataaccccaggaagagtctctctacctttggtgcaattcagatcttaggaataggacttctggggtcccctgtttggggactgtgcttagcacacacacttgggtccttgcatgaaagcctgcaaaagtatacgtgacttcctctcttttctcctcaaccactgcacccctattttggggtattcttagacttcttagtggggaggcagaggtggttgatgatgcgctcccagtcagtcctgtctaccttcttctacctcaaagggcttccattaacatcatccaggaagtgttataaatcctgccacccaggccacatctcagaccaatttaataaaaatatctgggctggagaggggaacccaggaattagtattttttaaagctcctcagaagtgcccccaggccaaggctgccagcaccatatccattcgtcagcgcgctcagggacacactggtaccctgtgtgctgacctgctgcagttagagtgacaaaagccggattttgattgtccagaaaagtaagggttctttgctgtcgctgtggagtctccagtcagattttccattggaataggaaacaaacgccaagtttattttaaaagtgctcttgatctacctaaaactaggaagcaggaagaatcctcggggagcagttgagtctcacatttgaatgtgtctttgcttcctctgaaccaaacttcatggtttcatccattaccaaagaggccctggtgacttaggagggatagaattgaactgaaaattccgggatcgctggaaaagtgatttaaccagtttttcaccacatagggaaagttatttggtgagataacagacctcgaggccctgcactcttctgcgtgtggttctgggttgggatacggttcccatgagcagaagatcattcctggctgattttgttcagtgattatttgtttaaaactttaaaaagaagaagcgcagatacagtacatttgtactcagctagccacgcaaacatctttaggctaagaataataaacaactaaattagtggtttgttttattaccaaactggtagagtttcacaggcaggaaaagacggtacctcccaggctggagaaggttaagtatttttgtcaaggaagattaaaaaccctaaaagcttttggttgaattttactgaaatcagaacgtgaatccatttgagagctagcaaccaaagacccgtagaggtgacatggaatgtttttaattctgagagatgggcgtttcagaactcggaaaatgacatttgttttgacatttggtatttttgttgccatacttactgcctttagttcttagtggaagtagtttgctgctcctaattacccaaaaggcaagaaaaaaataactagaaatttttcaaaagaggggaaataggtcttgaaagtttcattaattgcaaaatgaaattaaatggagcattcaatagaagtacttctcagaaccaatggagaatttctcagaaagaagcccattaaagctggattctctaaagcagtggaaatcccaggaacaaaagccaaatgcctgggaattgagtttcagaagaatttttgaattggtacagatcagtaatttacaaaatggaatggaatcactgaatgttctaaaatctgttcagctaaaatgggataataaatttagcttacatggaccctgcacattcaacttgtgctattatgatatatatatctatatatatttactgctatttattaagcattttctgtgaaccagggcctatattttgacatacatgatcttactttgtctaattacaaagattcagtgcctttcacagaagtcattagtagattttgggagggtcgtgttgatgactttttggtgttttgagtaagtaaaatgtgtaatggcatttgagatattgaatgcttgttaaagctgaccttgaaaataagattttcattccattgccgtgctttacaaatcaaactgccatttaggagggaaaaaagacaaataaatgaagtcaactttctttatttcttaaaccatgggttaaactgggtatttggacagatcgttttcaaggccactataggatacttcaggcaagtattttgaaacttgaaagcatttctgataaacttccagggaaaattctgatcttttggtccatgagagaaataactgctagttacaactctggattggaatcgcagtttgaagataatcagaactgcagcttaaacatcatcaaagagtgacctgtagcttagctttcttaattacatgtgtcaagaacttgtgataacagacctaattgaaatgacttattgagtcaggtaacatttatgcccttttaattaactataatttttaatttacctgatcagcattaagctcactttagccgacaaaaggctatgggctacagtcaaattgcaaatagaatacttagtaaatgtgatagtattagctcctactatggactaatattagtttggtcttgaccagaagaaatccttgtgcgtatttatgttgaaagatgaaataacttactgaaattgttaatgaagtattggataagctactttaaaaataacaaacccgactaccagcaacaacacaaataaacaaaccgtcagcctaaggtggacatgttggcttctctctgttcttaacatgttaaaattaaaattaacttctctggtgtgtggagatgtcttacaataacagttgctactatttcttttctttttctctttctttcctctctctttttctttctttctttctttctttctttctttctttctttctttctttctttctttctttctttctttctttctgagacaaggtctcaatttgtcactcagagtgaagtgcagtggcatgaacatggctcactgcagccttaaccttctgggctcaagaactcctcctgcctcagccctgcaagtagctgagactacaggcacgtgccaccatgcccaactaatttttgtatttttttgtagagacaggggtctcactgtgttacccaggctggtctcaaactcctgagctcaattgatccacctgtctcagcctcccaaagtgctgggattacaggtgtgagccatcacgcttggcctattgttagtattttttaataatttttttaaattgtggtaaaatgtatgtaacataaaatttatcatgttaaccgtttttcagtgtacagcttagtggcatgaagtttcttcacaatgtcatgcatccatcaccaccatttatcaccagattatttttttcttctcagacagaaactcaggatctgttcaacagtaatgcctgttcccccacgcctgcagccttggcaaccaccatactactgcctgcctctatgaacttgactactctaggtacctcgcataagtggactcacacttgtgactggcttgttacactaagcatgatgtcttcaaggttcatccatgttttggcctgtgtcacagcttccttcattttgaaggctgaatgatattccattgaatggatctactacatattgtttctccgttcatttattgatggatacttgagctgcttccccttttggactaatgtgaataatgctgctatgaacggtatgtacacatatctgtttgagtgcctgctttcaattcttttgaaattccacttccagaagtggcatttctggatcctattgtaattctatttttaattttttgaggaaccatcatactgttttccatagaagctgcaccattttacatttctaccagcagtgtacaagggttccagctgctctaattcctgaccgatatttcttattttctggtttttcaagatggccctcttcatgagtgtgaagtggttaacttattgtggttttgatttggatcttcctagtgattaatgatgttgagcatctttcttatgtgcggattggccattcatttatcttgtttttagagaaatgtctgttcaagttctttgttgattttttaaaatcaggttgttttgttgttattgagttgtaggcgttctttacatattctggacgttaatccgttatcagatatacaatttgcaatgctaccatttcttgaggcttacagtatgccagatgttctactaggtgctttatatataggatcttaattcattttacaaccctgagaaatagatattatcaccttcatttaatagatacggaaactgaggctttgaaagtttaaataactcattcaaggtcatacaattagtcagtggcaggggtaggattggatcacaggtatgtctcactccaaagcctatgatctcatgcagtttggcatggatactcttctatctttttgatttatgattttccttcatttaaaaaatcttttatttagaagtataataaatataccaaaatgtaaataaaatataaatgtatatcccattgggctattttaaagtaaacactttgtagccatcatgcaggtaaaagaaacagggcattgccagcccccataaggccatgtcccctgacaatcatagccctgtatcttccaccaaaggtagaaattatgttaagttttatggtagccaattccttactttccttacacatttaccacctaagtatgtcaccctaaatgatataaattagttgtgcttgttatttaacttcatgtagatgaaattgtagtgtatgtagtttgtgttttgggcttcatttgctcatagttacgtttgtgagatttcatgaagctaaagtttgttcattttccttgttgtattttattgtgaaagttcacccactgtatttattcatcctgttgtttttgttatgatatataatgctgctgtgaacattattgtacctgttctttggtgccttgtgcatatatttctattgggaacacaccaaatagtgaaattgttgtagatgtaatgccatgtatgagagttcctgttgttttgtatactctccaaacttagaactgtcagtctctttaattttagccattctggcatgttcacaggagtatcacattgtgggtttaatttgcatttccctgattacttattactaataatcttttcatatgcttattttcttttagaacgtgcctatgcaagtctcttgtccatttttcaactgttttctatttcttatgaatttgtaggagttctttgcagcttctggctatgcatccttcattaattttgtgtgttgcaaatatattcttccattttgtgacttgtctttttagtctcaaaacagaatcttttgatgaaaagaatttcttaattttgatgtaacctcatttatcactcttttccttcatggttggcacttgttgtgtcttgtttgacaatgttgcctatcccaaagtcatgaagattttctcttatgttaacttctaaaagttgtatcatttgtcttttatatttatatctacataatgcacctggaattgagttatatgaatgctgtgaatttgggaggggcgtgtttcctttttttcccacatggatatccaatcaactcagccacatttactgggggaagacatctttttttctaatgcgctgtagtgttaggtttttcaaaacttaggtgtctgtatatgtgtgggtctgtttatgagtctgtctattcttttccactggtctgtttcctacacttgtgccaatgccacactgtcttacttatagctctataagtcttggtattgttaaggaaaaatatttgtaacatttgttaaaaatggcagagaagactttattcaaggaggggaacattgtgataggtagagggactgctgcaacgaggtcttgctgtggtgaggagagagattgggctggagtccaacttctacaaggacaagaggggatttatagtcaagcagcagggtggggtcagtggatggaagaggaaacatcagagacaggggtattcttgctagaccaactcaacagaattcttgctgaaggcaggccagggtgataagatatcaagagttaggggtgaggacagataccaagggtggagaattttcactaaaactagtaggattcttgcttaaactggattctataagacagaaaaggaagcccaaggtcagggtctagtggaagagaaggctccggggagcccgacctgagtttgatctaggagagtctttgtcaatatcctgtagaatatgaccttcacctcattttcttttcctcaagtgtatctggactgtatttggccttttgggcttccaggtgacttttagagtaagtttatcaagatctacaaaaatagctactgagattttgatttgaatagtatttcttcctgataatttctgagtaaaattcattttaaggaagtaggaggggcagtggcctgatgaaaagcaaaaatgaagaaaagaataaggaaagacacagttttgccatcaccagccagtgtttagtgatcttaaaatagctgcttttgtttttgagcatcatttgttgggtatggagttgcagaagttgggttgagggacactggcttctagaatcaaatattggcctccatagagtgtttctgtacagtgagttgggaggatgggcaggggccactgaggactgtggcgtgtccccacgttagagtgtatctcacacagagcctgtcctgaaaatatagttatttttaaaaagtgtttccccctccttttcattggccattttctcttttactactctttacctagcaaagggtgggcatgagaaacctggtcagtggaagagaaagccattttgcaacagtggttataggggtgggagagtaaaatttcctggttcctggggaagctaagcccattggtaggaccagacttttgtatgtgtgtttcttcctttagtcatctactaaggttaataaataccttaaaaaaaaaaaaaaaaaaggacatgatctccctctgtcacccaggcaagtgatcctcctgcctcagcctcccaaggcactgggattacagtcatgagaccctgcactggctcattaacaattttttttttatatagagacagggtctcgccaggctggtctcaaatgcctaaccttgagtgattttccttccttggtctcccaaagcattgggattacagacatgagccgccacacccggccaagaagtgccttttatgtctcaggcactgttcttggtgctggggaacaagatagacaaaatcctcactctcatagagcttaattctagtactagagacagtcgagaaattattaaatagaagatgtaatgttgagctctgataaattctataggaagaaaaaggagagtcagggacagaggaagggaagtgacgaaggagccctgtggatctctgagagaagagtctcccagacagggggcaggtggagggtccaggacaaaggctgggcatgccaacaggggagaaagaggtattgcagtgggagggagggaaagtggcgggaaatgagatggaggaaagcagccctggccagacccaaaacctcacttcttatgatagatatttagtaacacccttttcactcttcaatgatgaaatttgtagaaaatataacctatctacccacatcattacaaaccatccatacaatgccttaactgtaatagaaaggaagtacaaaaggggagaaatgtatcatgaactaagaagtatttcatgactacactggaagacataatggtgtggtcatatgttttgcacccacttgtaggatcactgcaaacgtggcagctataaatccagatggctgcagatgtgttatattggccactcaaatgacataatcggtgttgactttagtgatgtgatatttctgaaatggtgaatacgtgttagtaaagttctaaacaaaacaaagtacatcattccctattgaaatccagcatttatgaaaatcatggaggaaacccttgtgttgacaggtaaaatggcgtaggcttttcagcccttccaggggagactggaaagtcctgggggacatagaatatttgtggcttgtgctagaccatcccatgtactgcaggttgtccagcctgtctggccccaccccttaaatgccactaatgactcccaattgtcctgtgactaccagaacagcccccatggatttccagatgctttttcaagcattttgggttttgtttgcatgtaatgagaagccagcagacagtttggatcagggaagtgaagtgacccaacctaggttttaaagagatctgccattcataaaaataatgaaggggaggctgaggtttctgtgtcacttagcaaggactcggcccccaagagtgagctgcagaggtaccaggctgacctctgtctgtctcaagcttagactcacccagaagtctgtctttctaccccagagccacctagaccatccatcagaggcctccctctaatgaggagtagggtgggggcaccccatggtgtcctttgtgccctaaaccctttacaataacaggtgttggctgtcacctgaagcaggtttcaaccatcactcccttcccaccatacacacactcccagctcattttgattccttttcctgcaataaataacagattcttgcaaagtggttagaagaaattagtaagttaagcctcacactagggttattttgccaggagaccttcctttcctaggtaaccccctccaccacgtgggcaccccagtgggatctgctgcagtctgcgccagggtttgcttggcctgcaagggttggccatggcagatgcctttcctgtaactggaatcccccatgcctggccttccagacagtagagagataattggataaaccctaaactggaaattacaaacaataactactctgttagtttacatatgaaactacttaagcaagtcctttttatttttatttttcgacaatatgaagctcattattcgtgacactcggggcactctcaaaatgtgctcaagaaaagggtcacggctgtgtagtatttagcaccagaatggaaacacccattccaagttctcttccatcctttggccactgagaggtttggtttagtggtcccggggaggacaggaaggggagagccactttaacttgctgttgttgagtgaaggtggggcaggagtgaaaggcattgttgttgctgagtgtgttttcatgaaatctaaccttatttaacatgatctccagtaactcactggtcttcaagttacataaaccttgatcgaaaattatttcccttttttttttttttgagacagggtctgactctgtcacccaggctggagtggtgcagtggcgtgactggctccctgcagcctcaagcaatcctcctgcctcagcctcccaaagtacagggattacagacatgagccactgcacctggccttgatttttttttatataaaaggatattagagcaaaagagtgaatatgtataccatagtggtcaaataaatacttctgcaggggccacacacaaaactgtgaaggcagaatctatttctgtccttagatgtgttggtcaataggtgtttgggcccgtgaatgtaggacccaaatgtaatagcagcactatactctacagcgtgtgcatagctggattcagaatttttggttttaaaaattaagcttttatttatatttacccatcaggtcaccgaatacttggattcaaccaaatgcttgaaagcttcttcatttgggggaaggtgggtttggaggcagaaatccctgcagactccacacccggggttttactaggtcctccgcggcaggtggaaggaaagcttgttgccctgcagttccgtttgcttcaaaaacaagggtgggaagggttcaccaattgatctttgtgcatatccagtgtaggaaaagtgttatttagagtatcattataaaatcggctgcatatggtggctcatgcctgtaatcccagcactttgggagtccaagatgggcagatcacttgaagtcaggagtttgagaccagcctggccaacatggtgaaaccctgtctctactaaaaatacaaaaattacccgggcatggtagcgggcacctgtaatccccactactcgggaggctgaggcacaggagaatcacttgaacccaagaggaggaggttgcagtgagccaagattgcaccactacattccagcctgggtgacagagcaagactccatctcaaaaaaaaaaaaaaaaaaaaaaagagtatctttataaaagcttgactcccatggtagatggacctaattaaggtttaccagcaagtcccagatattagcatagcataggaaattaccgtagaggcatgtaggagtcatccagatttggccaactcagaggatagagagaaaaaatatctctccctccttcctaatctcaagggagatggaaaacaagaagatttagagcttcaagaatgaggattgaggaagtacaatgtaaaaatggctccctgggtcccttcttggaaaaaaatgtccagagagtttccaaaagtggttttcccctcctttttgaggaatatgtgtttttattcctttgtgaagaatatcatcttagtagtcttatttcatttgtctatttccctctttaatattaatttgatctgagatgcttgtaaagaccaagcaacaaaaagatgtcatgccaccttcatttgccaccatcacctgtgaagttcagacaacgcagtatagacagagccttaagagggaggagtcaggcgtgaggctttgtgaggggtgggtggtcaggggtgtagccacagcctttgatcataaaccatgaccggttagaactgggaggaacctcaaagtcgctaggttcaactctctcatttcatagacacgaaaaatgaggtccaaagagttcaagagactgccaagggttgtacagctaatcggccgacctagcaatcgaaggacagatttgagtatttttttttaaagcataggcttttaagttctttatcattgtcagtttactttggtttgcctttaaccttcaccaccccagctggtaagtgtaaattgtcattgttaatgtgctttttccttgaactgcttgtgaaggactctctttcaaaggagccggtagaagggaggaaagttggtggcatattacatatctctacgctgagattcaatccagaacggccttgggagttcttcgtcggctgacacaaggcaaagccccagctctgatctgaaaagtttgtatgatgcattttccatgtgtattggttgattggttttgctggaagacctaaccaagagaaagcattccgaccctggcgttagccccactcatgagtctactttatactttctacattttgtctataaaatttgccacttaaaaactcttgtttcatagaaaatggacttgattatctgtatcattatgaaaatcctgctgcattatcaaatcttcctaaaaggttaaaaagcttttttttttttttcaatctctgtctttgctgtgattttagactgggttgtaaacaagctataatgtgaatggactaccaagagatctacaacagaagcagcctcagaaatagaaattgaatttataggcagtgagataggataattagcttttatatttaaaaatatcctcagaccagaggagtctgctgtctcagatagagaagggaattgagtttgaatcctaatgcctcaagtaatttagtagaaactgcctgttttatataaaatatatacggcagcctgctgtgtgtgtatttatgatctgtatctctatattcctctctaaacacatgagttaaagtgtcagtctaagtctgaacattcagattacacaaatcatttgtacttataattctcagccttaaatgttgttgttgatatagctaaagataacctgattggccaattatctcccttttttctttgagtggttatttggagttcaaaaatcaaacaaacaaaaaacatttctgttttttttacatggagagcaagaattgtctcggatgtttacccgaagttttttgttttttatccaaccattatgcactacagaatgtacaatttaaaatgctctatgtaggttaaacaataaaagacacgagaatattaagtgtctgctattgttaaatatgtgtaaattcaacatacctcctgtaatggccagtgtcttagccgctgatccctgtcactctgaattggcagaaaccagatcctggcttgggatcttgaacagatattttttccagggttgcatcacaactcttgggagggcatcctgtctgaaatatgctgtctccccagcctgggtcagcagggacagagagaaatagcatctgtcagctgggttgaagtctcccgcatatggagtcagtcactggttctttgctgagggttcagctaatgagacttgattgcttgtggcactcttgtttccaccaaaaagagcctaaaaacaggatgaacttgaaaacaagaggaagtggtgctatgcttccccatgactttagctccagtttgcctttgagcaagggggaagcagaaggaggaacttcttacgtacctgcacggtggttcataccaggggttcatcaaccctgggatcttgcccccttctctgcctcctgtcataaatctctgtttcaaaggaaagaaaggggatggttgttaaagcataaacctccaggtcagctcttgttacattagaccccaagatgatgtccaaaaccttttgttgaactgaaatgctagcttggtttgaaataactgagccattcattgcctagggatagaaaatctttctgttgtaaagaggtggttggttggttggtgtgtggctttgtttgcaaatacagaaagtgggatggggattggaatagtattggccttgtgggggctgaatattgaaagcagcaaaactggatgtacctaaaaactaaagttgaatcggcgagttcatccatccttttagagctattttcattgagatataatttctttcagttgcttgaagttttcagcatcagatcaagttttctttcttgctctccaatacctcttttgcttgtttgccatctgttcatttccactgcaaactgctctttacacaatgttactcggtgttaattagaacacgtgtctctttgtcattcatctggagaaggggttaatgatgatttatgtccctttaattggttttcctccaaactgttaggtttaatttattattttataagaattccaagagactgggaaagaggaagagtgcctaatttttattcttcatgtctttaactatatatctcttttgctttaaaaaagagcaatcttggcctaactattttggtgttttaaaagtatggttctttggccaggcgcagtggctcatgcttgtaatctcagcacttcggaaggccgaggtgggtggatcacttgaggccaggagttcgagaccattctggccaacatggtgaaaccccatctctactaaaaaacacaaaaattagccaggtgtggtggccacatgcctgtagttccagctactcaggaggctgaggcacaagaattgcttgaactcttgagaggcggaggtcaaaatgagctgagatcgcaccaccgtactccagcctgggcgacagagccagactgtctcaaaaaaaaaaaattcttcaagttcttattaaatgataatacatatgagtatgtatttactgcttatcagtgaacaatttattagtcaaatttgttagcttatttctgaataagtaacatgttatcatggttcaaaattgaaaaggtcccaaaaggtatgcagtgatttctttcctcctcctcctattgtccccagacttctattctgggaaaagggtttcctttccgcagaatctatgttgtcagggtcttgtgtgtacatatatttgtatttatgtatacacatatgtgtatagatggatatatgcataggtacatatatatgtaaatactttccctctttttatgcagagggtggcaaacatatatgctgttctgcatataccttttaaatgcattttggaatgtactgcctatcggtaggttaagagcttcttctttctttgttaaggctacattatactactgtatgatgacttattaactacttcctgactgatagacatttgggctgtttccagtttttcccaggatgaacagtgattcagtgaatagctctgtatcacattattttgtatatctctaggaaaaagatcctagaaatggaattgttgcagctgaaagtaagtacatttatcatttcgattgattttgtcaaattgccctccatagacgttaacagttaacaattctgctagcaatatgaatactcgtcagcttttttcatacttgtgaaaatagtaggtgaaataatgatcccagcttatggtttaatttgccctttcacttattttgagtgatgttgagtataatgagcactttaaaggaaaaaagataaatttttgtagttagatgtatatatatacatttcaaaggtggaaacctgtttgtgcattttcctttctaccccctcaaaacactaggaaattatacctagtttctagtaaattagatagctaatttctatattggtgtgttattaacagtaaatatgctgcaaatgttggaagatacctaacattctccttcatgtgattaccaaaaacatattgctgaaatccaatttcgactgacattatttttcaaaataatacatttcaaactaatcaaatcaagttttgatttgtaagggcacattacatgatatcttttaagatacaatattttaagtcaattaaactctgatgtatgttgctttttaccaaaagcacacagattatggagaactcaccaagtgactgacatgataaaaaagcaaagttcttttagataaaaatggccactttctccttgatatttttctatgggttgagatttagatgaaaatcccttgtggcaaattttaatgactatttctttaatgtaataactgaattcatctagatgatcccacgtccctcaacagagaaaggtgagagtctgttatttgttaggtttccttgtccatatttcttggtgggtcccacaaaagtctcatgaatctctacaagtgggaaaataaattgcccatttcttggcacaccgaactttccatgtcatattttaaaactgtaagtccatactttacatagctaaagaccaatgggccaaagcatggtgggtcacacctataatctcagcattttgggaggccgatgtggtaggattaattgagcccaggagtttgagaccagcctgggcagcatagtgagaccccatctctatagaattttttaaaaaattaccgatcatggtggtgtgtatgcacctatagtcctagctacttgggaggctgactcaggaagaccatttgagcccaggaatttgaggctgcagtgagctatgatgacaccactgcactccagcctgggcaacagagaaagactctgtatttaaaaaaaaaatggaaaaagaaaaaaagaccgaataataataataatatgtaatatttaatactttcatggattgggtactgttttccctcccctgtgagtccctgcctatgtttccttcaggccataaaaagaaagcttgtctggcaaatatgaaatttgaaaactgaccatctgctgaattataatagtagagatttacctttgggataaatatatttgtcattgccacaaagtttgtgaataatatttctgttgcccagtcatgaaatcaacaaacctccaaaatgaagttgctttaagtgtgtaatggcaattttgaattgttaaagtattccacactgtcgtgaaaccaatgtaaacccttgctcagaactagactcacaaaattttagagccagaaggaggtttggagatggtccagcagttcgtctcaattttataagtgaaaaaaactgaagctggggcaaggttaggaacatgttagcaagtgagtgaatgagtgagttacaaagctggcatccttgaatcttggccccagacctcacctggctaaattgttccagaaatcttgcctaaacacactttttttgtagtggaagaatgtatgcccttttagaaatcagttctaaggtctcttagtaaaaccatgtggtaggtcatccttaactgggggttggttttgctgaagacagtgagcacaagagaaaaccacagaatgctctttctaagaaacatctagacagcactcatgaggcatacacttggtgttccctccctctctttttcattggtaggctgtaaattactcccctgttggaaaaataaggtcttcaggctactcacggtggtgtgcagacgcacatacacaacagtgacagctttctagtggcttccgccatgcgtgaaaagagatgcaaaaggaatgcaggaatgttagagaaaataaaggcatcgccgctgattagctgggactgatcagagatgggttacttcacgtgaagcatgtaaggaaacctcttgtaaagacttttattatatttttaggaaggaaggaagaaagacagaagagaaaaacagagaaggaaagggaaggaagaagggagagagggaggaagagaaagacagagggaaggagggagagagcagggatttacctgcattacaggtagcataccttctccaaagtctcctttgtggaccagagggaccattggtggcagctcccttaaccacagtccagaactttcagtattaaaaacttagctgatacctctcaaggatatatatttactgcaggtccttcatctgaaattcagacacatgtagctagctacagatcacctataagatgtttcaacctcaacaaatttgggacttaacccatcatcttactccctccgccacttcctttgcttgatcttcttatctcagtgagttgcatcacagtcctccaaactgatgaggtcaaaactctggtaattatcctcaattctttcttctgtcccacctctagccaccatctaggtcaaacagcccagctgactgcacctcctttgtgtcttccccactccatcccctgcctgctgccactgccttagttcacagcctcatcatttcctccttgagttgctgcaacaatctccagctggcctctctgccacccagtttttgcctctctccaacctgtcctcctgactcttgccagagaaatttttctaggaaaacctacccaagcacggaatgcccctgtataaatgctccatgggttgctgagcacccccagagaaactgtcgtgactgatccacgctctcacttcctcggccttgcatcgtgctgtcccctgccctcccaggctctgtgccagtcacccaggcttccctcagtgcgagcatctcctcacctcctgacctttgcacaagccactccttctgaggagcactctctgtttcccctgcttctctcctccttgcctaactcctactgagctttctaatctgactttgagggcacttttcagagatgtcttccttgaccaaccgagtagacttatttaacaaacacttgcataaatttactgtgtgccaggcactgacctaaaggctttacatatattccttcctttacttctccaaactttaggagaaagggaggattccagtccccattttatggatgaggaagctgagaccttgcttgagtggtgaagcagcttgcccaaggtcacacagccttgtgggccagaagctacttctgcctttgtgtggctcctgattttgatttgtatgtagtataaatatatatatttttgtgtgtgtgtgtgtgtgtgagagagagagagagagagagagagagagagagatttatgttccaaattggttccgggtttgtcatctgtatatttaatatataataaattatatatacaatttattttttgaatagacaatagaagcacatattataaaattcaaaaaatacaaagtgtatacagtgacaggagcctccctcctcactttacctcccacttctccccaaaagcagctcctgtcacccatgccctgtgtatctttccagggatatttacaaatatatatgtagacactatgtgattttcttttatatttatgatagcctattctgcttgagatttttaatttgctttgtttgattaacagtataccttggggcttgttccatatcaatatattaagagcttcctcttctcttctgtgtctacataatagcccattgtagggatataccatagtttatttaatcagtctcctttttggatatttaggttgttctcaaacattttctagtacaatcagtgccgcagagattagcttcctacagacatcattttgcacacatacgagttgatctgcaggataaaatcctggaattggaatttgcggccaaagggcaggtgcatttataattttgatagatagtgccagattgtccctcataacggatgtactcatttattttctcattagtagtttatgagattgccccttccttcttagcctcacccttgcctatataataaaatgttttgatgttcacccttctagtatttttaaccagcttttttcttgttatgagtcgttatgcatcttttaatgtgtttatgaactatcttgattttctttattagctgatttagtattcgttggctcttttcatattgatttataggcatttcctatatattaaagaaatatatcctttgtctgtgatctatgttccagataggtccctggtttgtcatttgttgatggtgttttttccccatgcagaaaatttttattttcatgaaatcagatttatcagttttttttcttttatagcctctggggtttgagtcatagttaagactgaccttccccacgcctaaattataaaatcctcttctatgtgcatgcatgggtgtgtgaggttgtttcaaagaaagaagtgatagagtgtaatcgctgagaaaaccaactgtggagtcagactgacctaactgccctggtttcatctctatttctttaatcttggatgaaatgtttaatgggttagtaatatctatatcccagggttacaggtgactatgaagatcacataccacaatataggaaatcgtcctgtattaaattactgatagctgtttttattgtgttattttctccaagtttaataataattgcacaagaacaagggccctttcttctctttcttttgctttccccttgccattgtggcccttccccttcccaaactctgctgccagcaagaccttagcgtggtgctctgctgatgggactcgagtgctcactttgattgcttcactgtttattttgattggcgacagagaggcctggagttctggctggagccacctggagtgccacaggtgcttctccacttgccacgcagctgttctcccagtcccttgaggaccctggcgcctctccagatcttggcacttggtttctttccatgggtcaccggtgagagtccgtgttctttcctttgggccccctgcagccccttgccacagaggcctcatcccgagaggacttgagacagcgtactccccacatgggtgccctgtaaatatctttgaccaaagaagttaggagaagtaagaggtttggggtgtcatattgactggaagagccacaaatctcttggctatctcttcgttcccattgattacacaggaaggaattattccaaatcatgtatttctttagtggatgatccccttaaaaatttctacgatgtcagtttctgttaatatttactacagtttttattgtcatggattgtaacttcttaaaaatatttaatatcatgcaagctgttcaaagacaccagtaatttggagacagtgcagggaatcgggctgtgatttcctggcttttatctgtctctgctgctcccttctcctctcctttgcctgtttgtgtttcctttgtacactcacttttaacaaaggccccttgaaattccaggggtaggagacacagtggagcattgaggtaggtcatctcatatttaattttgccactctctggccgttaattaaaataatgcttgagtgctagtgtccagttttacagggggtgtgtaaaatgttaatcacaactgatctgaagcatccagtccagtgccagggagagggtttagggcacaggcagggagcatgttatcaggaaaaaaataaactagaggaaataaaacattttgttgttctttaaaaaattttaatatgaggccctactatgagcaaatatgaaggaggatgtgaagacgggtaaggtgcagtccgcggattcaaaggcggggccatctgcatgctgagcgttttactatactattccatttaagattcgcagcaggctgggcgtggtggctcacgcctgtaatcccagcacattgggaggccaaggcaggtggatcacctgaggtcagacgttcgtgaccagcctggccaacatggtgaaacccggtctctgctaaaaatacaaaaatgagattcgcttaaacccgggaagcagaggttgcagtaagctgagattgcactattgcactccagcctgggtgatgagagtgaaactccgtctaaaaaaaaaatttgcagcagtccagaaggtaggccccattattccgattgtatgggtgaggatactgagttgaagaggagtaacttgacattgatcccattgtacagtggagccaagattagatccaggggacctggtttcccagccccatcacctcagtcctattgcattaccctctggaaatgctcagtccagtaaaggagagagtgatgatgcaatgatgtgactgcttccagtgaagagtaaaagtaatgaactagaaacgggagaaacagattgacacccttgagttgtctttctggttagggcttttgggtttttgttctgtaatacagtccaatgtggtggccattcaagggagaagggccactcatcagccctcctgctccctcacccccatcttaattaaataagtctccttaggatctcacacacctgcatgtaacaaaacaggttttaaaaatctgtagtcaaggagcactgcttgtttctttctggcaacaatcccagtggaagtaaaattacactggactgcctgaaactctgagcccaaagcgttaatttttgaaaaacgtttgaggttcctgagttcccgtggtatgctactagaatattctgtagctttaacaactcccagccttcattctgcactgcaccccccgcacacccaatacctattccacatgtctggggataggtcagctcaccgtccaccctcgctgccccctaggctgaggttccctgatgagcacagttttccgggaaggatttcagcccctctgtgaaagtcttcagttatctcctctcttgtttccagaagtagcttctttactccaacttgaaatcttgctgtattccttagtgttttggaaacaaaatgtgcagtaggagaattctggctttgtggatattggatcactttgttccctggcacaacaatctctcctttgtattaaacatctgagaacagaagtcctaaataacatttttatattccttgttgatgtaagttctttatttggggacagcagtttggtacttgttcctctgtcaaattctgatgtactttccctttttcctatgatgaggacaccactgacccctagcctggaattttactttgggtagtggtggtatttgcttaccccgtgggactttcctgttgaatccctctagtctgcagtgagtggcctgtgtcatagtgggatgtctgactggtcggagcaaaggtacccaatcctccagcctgaccatgagctgggtggtgaactagccagccacaaacaagccagatggacagacagaccaaaatagccacttgtccacctccttcctggaaatgcagaagggctgctccggaggtccaagaagacctaatttggtcagcaacccagcacttactctgaacaggaggtggagttgtgagcctggtataagttccctacctccgattctttacttttaccacacacgtttgcacatttcaaggagatgatcagccacactaccaactactgatgggtaacaaatactctttacgtcaaagctcttctgatgattttcctggattctgtacttgtacaatgaatgtacttgtgcctttactccaaagaaaattagtatatgtggctgggcacagtgactcacgcctgtaatcccagcactgtgggaggccgaggcaggtggatcacttgaagccaggagttcaagaccagcctggacaacatggtgaaaccccacctatactaaaaatataaaaaaattggctgggcgcagtggctcatgcctgtaatcccagcactttgggaggccgaggcgggcagatcacttgaggtcaggagttcgagaccagcctggccaacatggggaaacattgtctctactaaaaatacaaacattaactgggcatggtggcaggagcctctggtcccagctacttgggaagctgagacaagagaattgcttgaacctgggaggtagaggttgcagtgacctgggatcatgccactgcactccagagcgagattctgtctcaaaataaaaaaaaaaaaagaaaaaataacaacaaaaaagaaaattagtatatgtgctttactctttaggcaaacccaatattatacaaattcagttttttaagacaggataggacattttatttttcagaaaatgtataaccacattccttaaatggcgtaggtagtataatataaatatggtttatcccctaagaccgtttttatttctatgtgagtttcaaagctctccctttttcctattcattcaacaactccacgctgagttgtcttatgggaggaaaggctgccctgcatggctctcttgcagctaatgaaatgagcagttggctttggtgttttatcactttgggtcagagatctatttcttgctccttactccttcagtgaatatctagttcgtgctccctatggatcaagcatcgtgctggtcttcttccatctgccttgttcccagtgggagcagttggaaggatgctgatggtttcttcctccaggagaggaagggcagtgtttcatgtcactcacaaccaagcagctagttgtcggctcttggaaaactagttcaccaaagggaagcactgagcctgaggccctgggatgggttggattcttttctaagtggaataacattctactcctcctgcttaacctttccttgcaaactaaaatgggaaaatcactctatggacaaagtcaagcagaaataaaaaataccctctctgaggcagcctggcagtacctgcatgaatcagccagtgtttggataagaagcagcccctcgagaaggaatggagcccttccctggaccttaattgatttttgtatttgttcttcttcttttaattctttgtggaaaagtgatttgtactgcagagtggctttaacatattatgggtgctgttttatgtaatactgttcttatctaaagatcatttctgcttgttttgccctattttttttcctgatccagctcatgtttgtttttctttttcattttatttcttctttttgaaggagttattgttcctcttatttctcccacttcatctacccccgttatctgccaggagaataggagaagacatgggccacttttttttttccatttttaaaatcaattggctagatatcacctttctctcgtgagtttgtttcataacgcagagcctcattagtaacgaacctgacccttaagaagttgggttatgtttattcctagggattaaggcactgttctggcctggttggccctttgctgtctgtgctatcgtccgcccctgctgaccagggcgtgcctggctcatggacagggcagctccttgcagaggtaccctgctgtcagggaaagttctatggactagtaactgctaagatcttttttgataaaatgagatcttgaagccttcaatcatgagcctcaaacaatttacataataaatccagaacttggagatccaaaagatattgccatgtttttggttatgttgctagggaactatgcctccgttttcaaatgatacattgctgtgtgtgtgcgtgtacatgtgcatgcatgtgtgtgtatgtatggaatgaggaaaattaggtgtttcatgcttatgcattgtagtgaaggctacagtgttgttaggcttttctgatggatatcataactcaaactacagaatttgtttacagcagtgttcatgtgaccaagaaaaaaaaaagcagatgaaaagtagccagacgtgttcaaaacacaactaatagatcaggtttctggaacatctgagtctaagggtttggtcttcctcacaatatgttgagaggtgatgttttaaaagcaaaaacggagaaaaggccagctgtggagaatggtaactgagacaattagaaagcagatgtgtgcaattgaatgtagtcagccttaaatggatccacactctcttctgtatgagggtctggaagggagagttcacagaataaaaatggagtcattttattctttctgttcaatatagattcccacatacagcgagtatttgaattgtgacttgctttctcattggcgtaattcccacctgcctttggaagtccattccgaggtgaccttgccccctgcaatatggaatgggaaaacacctggctgagtctagacgtctgataaccacgtaggtgggtaaggtaaccactgggatggctggaaggtgttacccagggaaactgaaggccaggatgaaaataaaagcaaacggtttccccttgggcaatgactgccatcaggattctgctgctgataaaatgctgctcctttgttctgcttcctgcgtgttcatccatatgatagctgttagacatttcattcagctttcacccacctggcactgcttcagtgccaaccaacggcaaggtgctccccagctgccatggggagccgggtacaaatagacctcagcgaagccctgcgtgcatgcaaactgcgtttgccttttgcattctgcttttctctcggggccatgcttgggacacttacacgctgcccgctttctttctgtgatgggggctggtgcctttgcactaggcccccacagtcatcaatagccctgttcatgtgggaggtgacagcaacattttgccacattacaggctgcagggctcaatgtgaacattcttcttagagtgagcaaagggcatgggacttctgacggccagggaagtcacagcctgcaccacagtgcgaagatcctccatctgggccatggggagcacttagaatgtctttttatgggttcaataaaatgtgatgaacaaatgtttgtggtgaagctctattgtgaggttttctgatcatatgtaacataattactgaaatctttgtcaggcattgttttgcatttttatctacaaaggaagccagtgacaagctcaccactgttctctgttttccctttagtcggttcttaatcatccaagtcaatagagaaaatcaccatcatcgatgacgcaaacccgtaaaaagtccaaaaataatttgtgtttgattttgagatggagatggtaggcatgtgaacaaaacgtgccaagacatttaggctactttgaggtccaggccaatgccctcccaactcggctctgctccccctgaagccggagaccgtgtatagggatctgggggaccggagggcaacgccagagaacaagtggaggaggtggctatcaatcctcagagtttgtcatccactatgaagaaagctggccaggttttgttctgataacatcacatagatattttatactttttaaaagatgatcagagtgacatctgtgtggttaaaaagccaaataacacagaaggcttttaataaaaaataacagccctgcctgggtcctgtccttccttggtcccactttccagaggaaacacctttgaaccctcccagctttgttgaaagttctttgggtggctaccttcatatctttaaataatatatggtagtaccatttgtactagttttctagggctgctgtgacaaaataccgtaaactgggtggcttaaaacaatagaaatttattatctcatagttctgagggctggaagtctgtaatcaaggtgccagcatggccacacttgttctgaaggctcagggggatccaccccccacctcttccagctcctggaagtgccatcggtccttagcttgccctctgtgtccctgtgtgtccctcctcacatggcattttcctctgcctataaggacgcagtcctattgggttagagcccaccctaacgacctcctcttaacttgattacatttacaaagaccgtgtttccaaattaagtcacatttacaggtactggggacttgaacatatcttttgaggggacataattcgacccataacactactctttctcagtttattgccttccttttatagtcaatggggtttctctccctgattcagcctcgtctgtgtcttctctcagacctcttccctctccatgctccgtccctccacttaaaggacattgcttatttctcaaacaaattcttggaaacctcatttctcattctgttgaccttagagagcatcacttaattactcatttaaaaaatgaaagcattcactctttcggctcccatcttctacctctgagcctctgtcagctagggccaagcttgatgccatccgtgttcttttcagttccctgaatggttaaatcctctgtcatttgtcctcagacgaagaatggatatttgtctacagcttctattgataggatctgaaagttgaaaaccaataaacagtgttatcgtgactctgtctcctggattattatacctttgcatgccctctgggttttaattaaaatactttataccatttgaaaaatgacagcataatttctgtttgtttagtactttagaatctacatttatttgattttagatggcagcatactttgcttgctctgaattgggaaactgtctattcgtttttcttgatgtcctttggcattacatattgaaatgaggctttgtgtcttataaatgtttgatcacatgacacagtagccgcatgggtctctctgtgagtttttagcaacaggtaagccattctaaggtagtgctagccaaactttggatttcaatgcttttcatttcttttttttaaagaccaatacagagatgctaactttttattttgccagaatgggatattaataaatcagctattatttactctcactggtaaaataagaacatttaacatgaaaaacaaaatagtaaggacataaccttggaataagttacacaattttaaaaattttgaatgaatttaactttcaaagaactcattactttccctcatttttcccatttggcatagactggtgaaaacattctgaatggaatggttgtcctagatcaaccttgtttagtggccatgtgtctggttttaatagagtagaacatactgttaatgactctgcttactctgtagatggttaggttgattgattaggacctggtatggaagatgtgcaggagaagggggcaggctttgtgtgaagtgggagagttggatcgccctattttgtgaccctaaactgtaagtagaaccccataccccttgccacatgcccctagtctaagccatttgtaagctgagctagctcacaaattcttgcccaacatgtgctgtgttgggcatgaatttaagtagatacatacagatctgtcacctttatatatgtagcccttgagtaagtcacgctttcactgtcttaatttattaccataaagttggccgggcatggtggctcacgcctgtaatcccagcactttgggaggtcaaggcgggcagatcactcgaggtcggaagttcaagaccagcctggccaacatggtgaaaccccgtctgtactaaaaacacaaaaattagctgggtgtggtggtgcacacctgtagtcccagttacttaggaagctgtggcagaagaatcgcttgaacctggaaggtggaggttgcagtgagctgagatcacaccactgtacttgagcctgggtgacagagcgagactcggtctcaaataataataatttttttccataatgttgtcttcccatatatattttaccagcttgaggtaatataactagtaaaacttaagcattcaaccaatgcacaatgacaccatttttctaatcttctctgactaaactaagtctaaaatggaatattattgactaaatgtatcccatcgactatatttgattaattaaccatcaggtaaaattctttctctccttaaggaagaagagattgggattaagattggttatcagtcatacccttgccacattgaattgaattcagttttcagaatgttaatgctttaataggaagttttgtgaaatcccttcagataagaagaaaattaatttcttacttttttttttttggtaagaaatgtttgtgtgtgtggcggggggggagggctgcagccaaccacaggtgattttaatgatggtaatatatagcaccttcctaggaccatgtggtttaaaacatcgatgaggtcctcttcacaacatccctgagaggcatttagatattgtcttcccatgtttttttgcacaggggaaattcaagacagactgaggttaagaagtgagtagcccaagtttagtcagcaggtcaattgcaaagtgagaaaaggaagtccagctctttcaaaccacatctcttatcctggctaatgaacagcatctccctgagtccatactctcaactttaagattccactctaggccactttactttttgaagatctgaacatttgaatgaatcagatacggctttccaattagaagtgtagacagtcgtgtccctcaaggtttcattgtaaggataaatgaaggtggtgatgcttttgagcccctgggacataggccagtccccagagaggaggaagcagctctgaaccagcagcatccctgagtttgatttgtttatcagaagtaatggtttggatagagctgtccacactgtcatcccattttattggtgaccaggaacatataccacagaaaagttatgaattatgaaactagagaaggtgacaagtgctggctttatgctgctctagctctgtgtcacttaactcttttggacctcagccatgccatcagtaaaatggaggtcatgatgttaactcctttccgttgtctttcatcctttgattcttctaaatgcccttcatcggaatcaaactggcagccgtacacttgccaggtctatgcacacagcagtgagctctgcaatccaaggaccagatccaagtacagatagggcccatgttttgcagctttgcattctttctcctctacatttcatctctgcctgcattccatgtcacctttggaagacctcatatgtcactgtctttctgccctcattgaacagagtgcactacccgtgagcttccagtatggtgccttctggcaatctacttgaagatatgatcttcattttggttgaaatctaataccccatgtgaagaacaaggacagtacaactcaaaattctggaccactgcatatggtatcttttctataacccatattttaaatacgtgtattaatttataacacaaacatatggatgtttcaaataacgttgggctataaaaaactggtattgataattgtgaccccaatgatgagaagcactcatcagaagaagaaggaattccattttttttttttaaggcagggtcttgctctgttgcccaggcttgagtgcagtgacatgatttcagctcctgcaacctctgcctccctggttcaagcgatcctcccacctcagcctcccaagtagctgagatcacaggagtgcaccaccacacccagcttttttttttttttttttttttttttagcaaagacagggtttccctatgccgcccaggctggtcttgaactcctgacctcaagtgatccacccgcctcagcctcctaaagtgttgggattatagacgtgagccaccttgcctggacaggaagaaggaactctgtctaagcacatttttggttttgtccagtcatgttgtttacacggccattgttacaaagcagaaaagccaccaggcatctctttacctctgaagcaagcattctaaatagttgagagtttgtggtacataaaaagaagccttctctcatgctaatgttttcaaaacaagttgtgacttctgaaagtagagaccaaagaaagaataacttgaacaagatttcagtgggtagaaaataaacactaactttatatgtatttcaagaacgtaaaagaaacaggtgggaaatgaatcctcctcgataagagagaaatgcttagtagggtggaaaaaaaaaaaagacaacattcagcagtttttggaactgtgcgagtccagagagtttctttctttctttctttcttttttttttttctggttagctctcatagccacaaatatgtatattatttccttcttgcccacaatttactgagaatcatctttctaatatactggggaatcccaaataaaaatctcatttttctaaacacagacaagtcttttaactcctgcaattaaatgattcaactattcatatgtagactgtaaaagaaataatcaaattgttctagtagaaatctccaacggccatctcaaatagtttccttcccaaatttatactgtaaacggcttaggtttagggaggggttttgccctagtcactgatgttttgaaataggactcagaaacctctttcataaagtctctgcggtgattgggctaccccagcaatgtgatatagtggtaggattacagaatattttaacccttttctgaatgttgcaatatattcttatatgggaaatgattgattattaactacttagaatgtgtttcttttccaagcatgtcagcagagtaagtacagcagacttcgtaggcgatcagtgtagtgtcaggtgtgagcagtatggactggagatggtctgcctggattcaaacctctgctctgtcctttcctacccaggcttttctggggctccttctgctcatctgctaagtgccacgtattacagcattttcctcatagggctgctgtgagctttaaatgcgtttatgagttaactgcttagaacagtgccagctatgtaataaacactacgtaagtggcagctacaccatgcataaacaaacgcaaactgtgtgcatctgaggaataattctagttaacattaaagtgtgtttttgtgtacagagttggtgtctgttgtctgtgcattcactttttaaaaatcgggaaatagcagatgttaggaacctatttattttgcttgctcttccttctactttctgcttgctacctactctattctagttccagacttgatctgtttctctgtgcagggttgctcctatgtacaaccaatgcagaactgaccccatcaaatttacaaagtgtattagtctgttttcacgctgttgataaagatataccttagactggacaatttacaaaagaaagaggtttattggacatacagttccacgtggctggggagacctcacaatcacggtggatggtgaaaggcacatctcacgtggcagacaagaggagaggatcaagtcacatcttacatggatggtggcaggcaaagagagcttgtgcagggaactcccatttttaaaaccatcacatcttgtgagactcattcattatcatgagaacagtgcagaaagacctaccaccataattcaattgcctcccaccgggttcctcccacagcatgtgggaattgtgggagttacaactcaagatgagatttgggtggggacacagccaaaccgtatcaataggtatggaaggaagtaaaatactattttttggtaagagctctcccactaagatatgaggacatatgcagaaagtgaggaaataaaactcaaagaaagtgaggaaataaaactcaaaattggctttcaaaagcaaattttctgtcagtaagatgtgacacgaatgttaaagttttaacaggttttgtttccttgtaaatatttacttcactatatctaataatctttgtgaatgaagatctcattggtgtcttttttaagatattaagaatattaggattacttatatttgaggactaaaagattggtagagacataattctatccttgtggcttctttgcatactttaatgctaaagttcagtacttaagattgaataaaaatgtcttgacaatcagatataaaataccttctttgggctgggcacagtggctcacgcctgtaatcccagcactttgggaggtcgacatgggtagatcacctgaggttaggagtttgagaccagcctgaccaacatggtgaaaccccatctctactaaaaatacaaaaattagctgggcgtggtggcaggtgcttgtaatcccagctacttgggaggctgaggcaggagaatcgcttgaacccggaaggtggagtttgtagtgagacgagatcacgccattgcactccagcctgggcaacaagagagaaactacgtcaaaaaaaaaaagaaaaaaaaaccttccttagtgtcagtcactctttttcttttctttctttctttttttttttgagacagagtcttgctctgtcacccaggctggagtgcagtggcgggatctcggctcactgcaagctccgcctcccgggttcacgccattctcctgcctcagcctcctcagtagctgggactacaggcgcccgccaccacgcctggctaatttttttgtattttttagtagagacggggtttcaccgtgttagccgggatggtctcgatctcctgacctggtgatccgcctgcctcggcctcccaaagtgctgggtagtcactctttttcttaaggttacacagtcatggttgactttgtaggggctcaggacatgccaccccagactatcatctccttttccaaggactgttccaatataatttctagtacctgagagactttctctgcataataagacacacttgacccaccatacagagcctcccctcatcaacgcacagcttgtgtccccaccacccccagaagccccaagcccctattccgttccatagctcaggatgctaaatgagtttcaaccgtgtgacccttcttcaagtctcatattttgtgggactcccatgtgcacctacattattaaatatggggtttctttctgttaatttgtcttacgtcaattcataacccagccaagaaacccagagcggtggaggaaagccatttctctctcccctacaacttttaaatactaaaattaaaaatgtccccacccaccaatattggaactccgtggtatccataagctgggttgcatgttagtgattgtaataagcaataaaaatccttgcatgtcaatattttattaaatttgattattcatggatttgtgaccattattatttgctgtttattggtttgttgttgtttttaaaatattttacttggacttatggaccacatgtttgtttcagaaattcttcaaaagacagcaaatccctagtaagtgggaagaaaaatcacttaacagtattccaagtacctcaaaagatgcaaatatggaaagatgaatatgaaaaagggtactcctagagtttatcaattgtctatccctggagaaagtttccattctccattaagactccaacggctttgaatagtatatgcttttgtgtatacaatgaaaataaaccatcatcatcgtcatcatattaactgggcttgtgcccattgtagatttcatgaaaaataaccaaccatcaaaaatgacttgacaggagaagccaacaagccctaacattaaatggtcctgtaaaagtttgcaggtatattatttgtgtattcagtaatactctcaattagtgtttatgacttcattaacttaattcatttttcatgaatggtaaaaattcactctttcctacattcacaaatgataggctattttgatggaaaaccaaagactcactatatgttctcctttgcagtagcggtagtagttgcagccaccaacttcagatgtgcagttcctagtttactatgtgattcagtgtgcttttattgagggcctccttgtcgagagagagtataatacactagcaggagtatatgttttggagtcaaactgttcttggctcagatcctggcacagctacttgcttactgtgtggtcttgggcttcctggtctgtaaaatacccgccctgcagagttcttgctgagttgaagtgagaggatgtatgtgcaagtgtgcggtgcggcattcggtgggtactccacagcactggcttccctttccttccacactgggggcctgctcctctaattcctgttcaccaagtagacggggaggaagagagtggtgcctgaaactaccattttttttagtgagtcaaacgtgtcatgttgtgacatcttaggcatgtcccttcaccctgggggtcttggttaactcctctgttaaattcagagcttgcctttttttttttttttttttttttgaggcggagtcttactctgtcacccaggctggagtgcagtggtgcaatctcagctcactgcaacttccgcctcctgggttcaagcgattctcctgcctcagcctcccgagtagctggagctacagtcacgcaccaccatgcccagctaatttttttggcatttttagtagagactgggtttcaccatgttggccaggctggtcttgaattcctgacctcaagtgatccacccacctcggcctcccagagtgctgggattacaggtgtgagccaccacacttggccagttgacctttactttatgattatttctaaagcacttccagatctatccttctgtgatgctatgatactatgaagcattaagttgagactaggagattaacagtagggtgttaaatggacaggactgatcacaatcttatatggtgaaggaagaaccaattggacttagtgacacattaaatgtgattagacatgaattggaaactattttgaggtaatgttccccaggatgccctctccaaaacactagttgctgaggatgggaatagatgttaattgaaaaaaggtttctgaaaagcatttgggaaatgctaacttcaccaggtttctttcctgcaggacttctctgattctttaatatgcccatatgcatgatgattctgaaattggggaatgtagtcatagtaggaagcatttctaaagcttatttcttcatggaatcagaattatgttgcacccaagtagcatcttacaggaccagtatttcatggaaaatactctgtgaagtgctgctctatggttttaaaccaagaatgaggtacaatataggggcattgactcaacccagtgaatgtgctgagcactgacctcgcaagatcctgtggagggcggaaatggataagatcccacctctgcaacaaggctggcaataagccattagtggtggcattgtctacatggctaatagcagggatgccttgggggagacaatatcccaccgaattactgatgcagattcagttgaggcagtatccccagggtgcaaagtcctgatttctctctcggatgtgcttattctctgtctctctatgaagctcttataatggtattagcatccagttcaccacggagaaattctgcagataaaatgaacgtaggagctaaaccaatgggaagtttcattcaggagaagattttacaaaatggactctttggacttcgtttttgagtacatagttatttgaccaccatttctacacttggccttaaagtcaaaatataatctaaggcgagaagtctaaaaactatgtagtagacaaccttgctttactgtgaaggacatggcatctcaatgttggcagaacctgacgacgtagtttgtttttatttctcattgatgaaagatgagccagaggcctgatggcagattttactgggaaggaccttttctcaccggtcagatccgtggattatttcaccactggatttttctgcctgttaggcctttggaaacattttggcagattgagcagttattttgctcatgttgtgagtagcgtttctctgaccttttgttatttactgaaacaatccagcctgttttcttttaagagaagcgtgaaatgaaggggagtcagtcagcacatgctgactctggtatcagaaggctaacttttgggctgcttggcaccatgtatgcttttaaagttatggggtcattggcctctttgtttcttattcccatgattttgaaggagtcttttgggggaatttttttttccttgctaaagcagatgcatgtaaggttagtaattaaaaaaatatatttcactatgtctataaacataaccctctaagttttcttacgacatcttgggcatggtagattatctgaagcctctcctcttttaaacattgatgtgacgtgatggggaggccagcttggcactggaatggtggcttggtgacagggcatccctcactcctgacctctcatgaccttgtgagtccagacagtggaggtgatgacaccattcaggacgctctccaccagccgcaacagggaactccttctccctagtgctctgcctacctatgcccagaaaacctatctccctgatgtttttctggttcttcccctagtagaagatttccattctttgcaggttgacttgcaaggataaaggaagtaccaagatcctattgtggccgggcgcggtggctcacacttgtaatgccagcactttgggaggtcaaggtgggcagatcacctgagatcaggagttcaagaccagcctggtcaacatggcaaaaccccatctctactaaaaatacaaaattagctgggggtggtggcgggcgcctataatcccagctactcgggaggcttaggcaggagaattgcttgaacttgggagggggaggttgcagtgagccgagattgcatcattgcactccagcctgagcaacagaataaaacttcgtctcaaaaaaaaaaaaaaaatcctgttgcatcttcaaagatgagaaaatgtgcgtgtgtatgtgtacttgagtatatgttcattcctatctccccatctatctacctgcctactgatctctttctagcccggtcagaaaattcaataggaatcatggcttttcattgggattccccatagcacttgagctcagctgctagtgttgaagacatcactcaaatttgtcttgtttattctcgtagccaaacataaaaatgatcattacctacataaactaacctagatgatcattaattgaggctatttaataatgatctgcatgtttgacaatcaccattgtctaagaatgggccatggctttaggaatgtttcattcatttcttcagtctttcagtcaacaaataacacactgtcctaggtgctggggacacagtgtgagcaaagggacacaattctcatggtgccacatgggcaataagtaaaaccgaaaaataagaacgtggcagacaacaaaatggataacgtagggtgtaactggggaggatggtgatatggtttggctgtgtccccacccaaatttcatcttggatcgtagctcccacaattcccacatgtcatgggagggagcgggtaggatgtaattgaatcatgggggcgggtctttcctgtgctgttgtgataatgaataagtctcatgagacctggtggttttataaaggggagtttgcctgcacaagttctgttattttctcttgtttgccgccatgtctttcgccttccaccatgattgtgatttataattttctttataaattacacagtcttgggtatatctttaccagcagcgtgaacacggactaatacagggggaaggctagtttaaatatgagtttcacaggacctgtttctttggcttgaggcctgtgagatgaggagccagccctgagaagtcctgaggaaaaacttggagacagaaggaagaacaaacggactcctctcccactgaatgacctcatgtatatgtttgccacttgggactatgacctgatgcctctttaaacctctaggtcattgggaacatccacaaaacagctgaaagatgctgttttgttagaatgctcgttgtaatgcaggatgctggtgaacccagtgtgaacttttcaaaaacctattgatcccaccccacccactctctagagctctcatattgacaaaggatacctttcacagattagaaagtcagtagactccatttcttagaggaaagttgtggaaaatacttaaaaatactgtgagtagaagaaagaagcagtttagagcttcaaattcaatcgggctaagttgggcaagctactgccttataggcagtaactttctcatagaactttaaaaagttttattttgcaataattatagacttgtgggaagttgcaaaaatagtacagagagggcccatgtactcttcatcctgcttcttgaatggtaacgtcttgcataacaatagtaaatggtatcatgtatatagcatcacattatcaataccaggaaactgacgttagtattaggccttaaacagatttcaccatggtttatgtgcactgatttgtatgtgtgtgtgtatctcaccccatgtctagattcctgtaaccaccaccgccatcaggacacagggttattccatccctaccaagaaactcccttgtctccctgtacttttatgtatgagaaatggcagcagatgctgtcctgcttttagtctgaatcatattctggaaaaatctacagtgagagaaggtggatgagtctttgaaatctattggttgaaatgtattggcactgagaatctgcttaattgatatagaaatggagttccttggtctgacttatatgaagaccatctacaagctcagaaccaaaaaacacaggtttgaataagtaaccctgaccacattatgagagtccatcagttgatgctcaattggtttaagaagctaataccagtcatgtggcctgagtagtttatttctaagaagaaaactctttctggcaccacacaacttgggggattaataatatatatatggagcgtttggcacatttctcgaagatgacccaggaagcagacacaccagtaatgggttaacaggtcacccgaagagtgggtgcattccttatggaaaacagaacacatgatagaaaaatagccttttgtgtgtggaggcaagaaacctttaggacgtgcagttagcagtgagaacttaaggaaggtgcaggctgaaatggaaacacgctataaacagattgagagagagacaacagctttaagggaaaacatctgtctggtggatctgacatccaaaagttgcatctgtggtctaggaccaatcttgtaacgcttaaaaaaggaatccacagaggcccaaagcgggctctgaaagtttctttctttccttgagattttctgtttgctctgcccagaatactgcctaggacggatgaaatgaactcatctggtcctgtttctcaatgctgaagtagcacgccagagaagttaactttagaacagttggttgcagcaacattttacctggattattctagacatactgataaggggagtccatttactctgccaaacgaaacttctggaaatctttttttttaaagacagtcttgctctgtcacccaggctggagtgcagcggtgcgatcttggctcactgtaacctccgcctcctagattcaagtgattctcctgcctcagcctcctgagtagcaggaattacaggcacccgtcaccatgcctggctaatttttgtatttgttgttgttgttgttgtttttgagacagagtcttgctctgtcgcccaagctggagtgcagtggcgcgatctcggctcactgcaacctccgcctcccaggttcaagtgattctcctgcctcagcctcccgagtagctgggattacaggtgcctgccaccacgcccagctaatttttgtatttttggtagagacagggtttcaccatcttggccaggccagtcttgaattcctgacctcacaatctacccacctcggcctcgcaaaatgctgggattacaagcatgagccactgtgccgggcctaatttttgtatttttaatagagacgaggtctcactatgttggacaggctggtctcgaactcctgacctcaagtgatccacctgctgtggtctcccaaagtgctgggattacaggcgtgagccactgcacccggccgcgaaacttctagaaatcttgagagtgactcttccaatattttgtatttcaagtagaagttttcagtaataatgaagttgaaagccagaagagaggagcagataatgttctcatgaagcctcagaagacattaggagcatctatctcgatattagattgaattgaaaatttgtcatattagtcccttgacttattcatattttttctcttgagccattggtttgtgttctgtaaacacagcctaagaggctattttaaaggaaatggagatcaggtgttctccatagattcccatgctcgatttcccggagtgggagcaggagagaattatgagcaaagagtttcagccctcaccctgggacattacccctcctccctgcacagacttcacagtgggatgctggtgaattttttaatgttaatttttatttttaaatttaacttttattttaagttcagcggtacatgtgcaggtttgttacacagataaacttgtgtcatggggctttgttgtacagattattttgtcacccaggttttaagcccagtactcattagttatttttcctgatcctctccctcctcccacccttcatcctctgataggtcctagtgtgtgttgttcccctgtatatgtccatgtgttctcatcagttagctcccactaataagtaagaacatgcagtatttggttttctgttcctgatgttagtttacttaggataatggcctccagctccatccatgttcctgcaaaagacatgatctaattcttttttatggctgtatagtaagtattcattccatggtgtatatgtaccaaattttctttatccagtctatcactgatgggcattgaggttgtttctgtgtctttgctattgtgagtagtgcagatgctgatgaatttgcacttcatattcagtgattttcgccttgaagaacataccttacccaatccatgttacttgaagacgaccgtaactgaggtgtaggaatttgtcctaaattactgtaaacaactttttggggcatttcacaatattccagcgcctctccgttccctttcattgtcttctccacctgatccctctttcaaactcttgtctttatttttatacatcttaccccaaacccagattgcagtaagattcctatgtgcattgccacatgcattttcagcaatttgaaattttatctaatatcaattaagctggtataaatcataccacttcacatacgtgaagttgtttgctacagccctgttctggagaacggtgagaatgccctccttgttttgtggcaggggtgaggggggatgttttaatgaggagagactggtaataagggattgtggtgaactggcaggggaggaaattcaataaacagaagagaggaactcaggatagttgggcactggagtgttgcaaataaagcaatatgtgatgctctccccatggaatgctcacctacgctatactcagaatccctgacagccgttttgcactctccaacactggcacacaatggggtctcagggtttgttgaaataaattgggctctatatcatgtgttccctgatttctcctcaataatgtgtgcttcccagccctgcattgaaaattaggacatcaagtgacattgaagtcagataatctgcctcatgtcacatgggttgaatgtggtagatgtgatctcaggtcttttgactgcctcatggcaccttccatttccaagcctctgttttctcatattcttaaggcacagaattcatcccattacttggtctggtgttgaggagaagcttggcataatggaaagactcaaatttcatttttttttccttcttagaagaaatctgtagaactgtttcatcacaacctgtggatagctgacgcagtttgaagatctacaccttggagtcacccatctcacaaaatgtcagccggggtgctcattggtacattgtttgttgtatatttcctcataccttggaaaggactagttgaatttgttccaaaccaagcaattgacctaggactttgcatcctattagtgtcggccacaattcaaatccaactccttttcaaagttgtattttttacgaaaggtgacctgatagcgagacaagagtaatgacgggtgaggcactctcaaatcaggccagggtggcaggccgggacatcttgttttcatcagattctcgtagttactcttgacttttctgtgtgtttgctgaacttgtgagattctattgtgctctttctagctggatattttccagagggttatcaagaaaaaggagtatcttctgcattaataacctcgggaaggattttagcagtaaaattagagaccagatgatctgctggacagcaggatgggggagcatttcttcccctttcccaggagagtgtcaagttcagcatgacctagcaccagacctttcactcagtaactctgagatcttatcatatcaagttatctcagtcatgatgacgtaaatggcaaaactactacccttatttcttgggataagaatttttcgctttaaaggaatacaatatacaaaataggtgaccatgaaatatgcttggtgggtcagctaatttccatatgtgctttgtgattggtttttaagtgaatttattgctatagagttccaaaacaaccctttaacatttatgttttctgcactttgtctcattattgaaaataacaagcgctatgtaaaagcgtaaagaatatactgaggtttacagcaaggataaccaccaaagaccgggagttagaaagctatggcctgtgggccaaatcttgctcaccacgtgcttttgtaaataaagttttattggaacatagctatgcccatttgctatgtattgtctatgtctgctttcacactgcaacatcagagttgagtaattatgatagagaccatatggcttaagatatttgctatctggtttttcactggaaatgttttccaacccatgctatagatattttcatggtatttatttactgactcgtttgttcattctttcagtggacaccaaccctgttaatgacgctggggaatgtaaagataagtacatcagtctctaatttccaagagcttataatgtaacagagacaagttatgtactcaaataacagagacaagtcatgtattcatctttacctctgaccaggcagaatgcagcacgtactacagacaagaaatagctaaattgctgtggtagtttagagatgatgagagcctccgacaaaggcagggaattgggaaatgcacaaagatattgcttccataactgtggcacacagtgatttcccaatagggaacttcatgagaaatcaggctaatttccttcatggaattttataaattgtagtatccaaaagagtggaagtgatttagaatattactttgtgtccagattcctttatctagaagcatatttcccctgtaactatggggatgatcatatttatagaaaatttttgaacatttgaaggaaggcttcctttatcagggtgggaagacagaaggaattccttttcttttttgctgattgttcacttcacagtgtaatattaaatgctatgggtcttaaagaaaggcttctgtggggaaaccctcaaatatcaagtggactataaaaacaagataggctgggtgcagtggctcacagcggtaatcccagcactttgggaggccaaggtggatggatcacttgagcccaggagttcaagaccagcctgggcaaggtggcaagaccccgtctctaccaagaaatacaaaaattaaccaaacgtggtggcacgtctgtagtcccagctacttgggagtctgaggtgggaggattgcttgagcccaggagggagagattgtagtgagccaagtttatgccactgcactccagcctgggagacacagcgagaccctgtcttaaaacaaacaaacaaaaaatcaagataaaattatagaaccctaaccatggaatagcaggactcagtgacaattacatctctctcttctccacaatgcatgcgagtgtgaactgagattttggtaagttcccatttccctttggcctattgaacccctttaagggttcagcccccaaccctgggaagattccatgcatgaaaactacccaaatcctcccagttgggattaatgtgacctgataaagagttctgatttttttttttttttgagacagagtctctctctgtctcccaggctggagtgcagtggcgcgatctcagctcactgcaacctccacctctcgggttcaagcaattctcctgccttagcctcccaagtagctgggattacaggcatgcattgccatgcccggctaattttttatttttgtagagacggggtttcaccatgttggccaggctggtctcaaactcctgacctcaggtgatccgctcatcttggcctcccaaagggctgtgattacaggtgtgagtcactgcgcctggcctgatttttgtgtcaccagaattgccttgtccattatttgtgttttccaaatatctattgaattaactcgaattggatgcagacagacattgtgcactcaaaacctaggtgattgatttggaaaaagattcaagacttttaggttagtctaagagatgctcaggggaggccccttccattttgcttccagcagggtgtcaaagttattggctaaattccagcctccctttctttatactcataacaataaaggtaccagcatgaatgcagcagagttttgttttagaatataatcctgtgaagttttaccagccgaaagcataatatttggatggataaaatgtgtgtttggtgagaaagctactgaaggaacataatattggacccccaatcaggtaatttaaatgttataggaagcaccaagcccacctatttcacaggcccccgcctctcccctacccggagtagcagggctcccgcagttagccatcccacagctctccaggggctctgctctctcgttaccaagaagcacatgccagcccgtctcccagcgtttcctggtcctttcacaatagacagatggggatgctccaggtagagacaaaagagaacacacaatccatacgctcatcttgctggtacccttccgctccctgagcccaaagaggagaacccagccctctgcgtaggaagaacacatttcaaggcatttactgacaagtaggtatagttactgcatacacatgtggaggctgcattatatcaaaactgtaaataaacatagactctgcacactccttcaggccccaccatgtatttatgaatgggattgcttcatcattttcttttaatgtcagtagcagggaagtcagaaagcattacctctaaaacggggacagaacattgcaaatacatacatttccaaccagctgtggcaataaccagcaaacaaaattacttcaccccgttgttatgggccccatgcctatgggatttttcctgagtttctgatttataacaatcacttttgaaggcctcaaaatgcttaggtgagattaaattactgattatccaaaagttctgttttcgctggagtctttctggacggctgctgattcggtcccatttaaagcattcggtggcatgaactcactcggtttctgcccacatcactgcattcctgggatgccgttcacaggccttagcaagatcatctgacagccgcctgtgaggtcaacgaactttatacataattaaacactcccagttaggagaattcatttctttctccctgagaagcagagaaagaatacatgttgtgttgccctccattacggagtaaaagttgtgtggagtaatcaggctagtttcacatgatttaatgttgaaccgaataagaaagtgattgcatcctctactgggcctcacagaaaagtcaccacccacattgtttattcagactgggatcttggccatttggggtttaagccagaagaaagaggaaaaaaaaaaaatccaaccctggaatgaacgcttttgaaactctgtattcttgatgaaatgcggccaagggttcttttaaaaaaaactatttaaaatcaattaccaagatcatattttcatttacaatgggttgttagcaacagctaattctctgtttccatccagatttggtgtttaagcttcaatatgctggtattggaatccttgccgtgttttgtctgggtatcagatgctaccaccaaactatgtgtggggagttgggcaactctgacctttgaccagctttccataaaataacaaggaaaggtgtgaggaggctagggattgggtgaaaactagcctgagggatggcagtaagtgagcttcaccagggggatgaacatataaaggaggcactgaggatattgctaagggtaagagaaagcaaaagacagaatcatatgccttgggaggagggtcaggcccgttaaggcacctagtccgtctgtctctagccaggactgcaagaaatcatctcagacatgcgatcttgtatcgcatttttaaagatctcaagaggagattccggaacctcccttggtcatccgccctattatttaacaattcctacagccaggaaattctttcttatttccagcctaaaatgtgcatgtggtgcagcttcaggggaggtgattgatcgaggccacgcccacctcccccccgcctgtttactccttggatgggatggtgcatatgtcttgcttcttccttaaaatgggcctctctcggcctccataccacagtccccgggctgggagaggggtcgtggtatagaggtggggtgggggccgaccagcggcgtttatggggaccagccgccaccaggaactgttgctaggcattttatgtatttcccagaggcaagagaacatagctgtgatgtggccaggagtgcgcctcaaaaccacgtgcaaataataaatgcggaagctcccgtttcagattttaaaagaaaagaaaagaaaaaatcctgaaaaacagaatgaagagtctagaatttcactggcctcgagatggtagtctactcctcaattttaaacaagaagagcccagagcagaaaagggacctgtcccggacaagatctcagagctaatgcccctaaacgcagcgcagtgccctgttcttaatttagatagggtgctggaaaggcgaaatcatgctggaacggaggccatcgatctcacttcctccggccccttcctcctcttcggcagatgcgcagtgaatggtcaggccctccgtgagtgaattacagattcattgaagagccgtcagatgactggagcagtctggtttcttccctttttatcgagttctgtcattgtgttcctcaaactgtggtttgttccagaaaggaagaggttgtcttcttcacccgcctgccctaagttgcgtcaagttccagttccctgtattaagtaaattactaaatgagtggaatgaacatcataatgtcaagggtagggcgttgacattatgggacaatagaccacgagcccactctgtcagctttttgtcccgcacctctattatctgtcaaatgatcatattaacactctcctacctactttagggggctcctaaaaacaaatatttattgacaggttatgtattagtctgttttcatactgctatgaagaaatacccgagactgggtaatttgtaaagaaaaagttttaatggactcacagttccacatggctggggaggcctcacaatctgtggaaggtgaaggaggagcaaaggcacgtcttacatgagggcaggcaagagagccatgtgcaggggaactcccatttataaaaccatcagatcttgtgagacttattcaatatacgagaacttgggaaaaacccacctccatgattcagttgcctcccaccaggtgcctcccatgatacgtggggattatgggagctacaattcaaggtgagatttgggtggagacacagccaaatcatatcatcttataaatgtagaacacaaactccatgatatcctttatataaagtttaaatacatttaaaaatatatatatatagtttaaggatacacacatgtgaaagataaaaccatgcatggtgataatgagcattgagcatcacacagtatttttttattgtgaaagatctcgagcaaacagaaaatgcagagaataagattgtgtataaatgtgcattcaccactattttgtcatgtccttgttcttttttgtaaaaaagagatagactttccccatttccacccgctttttccttccctgaacgtcacagtcatcagtttaaatgtgatgctcaatgctcattataaccatgcatggttttatctttcacatgtgtgtatccttaaactatatatatatatttttaaatgtatttaaactttatataaaggatatcatggagtttgtgttctacattgtatttgtaagatttgtccgttgcaaaacatggacctctatacattttccatgctgtgttgtagttatcagatggaggacatggaagttatttctaattttaagatgtcctttggaagaatgctacaggtgtgtctagctttttgatatgttctttgcacaccatgcctggtagtttctcttggatatgtagccagtagcaaagtgatgaattagcacatcgtcttccctggatgttgccaaattgctctccaaagtgcaagccccttctcagcagcagggtctgagaattcctaatgctcagtattctcttcaatacttgttagagtcatatttaaaaatttttttcctttgccaatctgatagttgtttcaggtttcagttgcaatttcctgattaccagtgaggttgagcatattttcatttgcataccgagtagtcaggatttcctccatgagttatctctttctttccttggcccgtttttctattggttcgttgtttctttattggcttattggagtatgtaatgtatgcttgacaccactcccttgtccattatatgcacagcaaatatcttctcttggttttgtaattttattttgttgatgatggtctgctaagagattttcattattccttttgttttattctcataagagatctgtgagctagatgctatctctgtttgcatttttagatgaggatagtacatcttagagagtttaagtaaattgactaaggtctcacagctggtaagtagcagagctgaggatcaagtccagatcgaattccagagcccatgcgcttaaccactgcctctaagtcataactactatgagtatccccattttacagatgagcacacagataaggcccagagaggttcactgatttgctcagagtcactcagcgtggtagtgttggaacaaggactgttcctcaggtcccagactgccaacacaactgtatacctagattgaaatgttggggaaatgatcggtgatagactagataaaggaaatgtgatacatatacaccatggaatactacgcagccataaaaaggaatgagatcatgtcctttgcagggacatggatggaactggaagccattatcctcagcaaactaacacgggaacagaaaaccaaatactgcatgttctcacttataagtgggagctgaacaatgaaaacacattgatgcagggagggagacaacacacactggggcctattggagggggcaggaggagggagagcatcagaataaatagctaatgcatacggagcttaatacctaggtgatgggttgataggtgcagcaaaccaccatggcacacgtttacctatgtaactaacctgcacatcctacaaatgtatcccagtgcttaaaataaaataaaattaaattttaaaagaaaaagaaaatgttggggaaatgtgcagaaaaagatcatgtatacccttttaaacagtaactttaaaaattatgaactatttaatatttaaaatacaaaatttacagagaataatatagcaaacaatcaggtaccccaactcagatttaataaatattgacattagccacattttaaaaatattttttaacagaaaatgttgtagtttaagcctcttttgtgaccccaaactgacagcattcttccacagctttcccagcagtaaacactctttagaagttgcactgttacatacctgttgcattttgctatgtgattatgtgtcataagccaggggtccccagcccccaggccatggaccggtacaggtccgtggcctgttaggaacctggcagcaccgcagaaggtgagctgcaggagagccagcatgaccacctgagccccacctcctgtcagatcagccacggcattagattctcataggagcgcaaccctattgtgaactgtgcacccgagggatcttggttgctcgctccttatgagaatctaatgataaatgtaatgtgcttgagtcatcctgaaaccatcccccacccccgtctatggaaaaactgtcttctattaaaccagtgccagaaaggttggggaccactgtcataaacaataactagtatcattttgcaagtttaaaaaacgaatggtaatgttatcaataatccatctttctggaacttgctttatcacttgaagttatgtttctgagatttatcctaattaatgtatgtagagctaattcctttaactgttatattgttataaactgaatgtttctttccctgcaaaattcatatgctgaaatcctaatcccaaatacgatgctattaggaggcaggattttggaggtgattaggtcacaagggtagagccctcatgagtgggtttagtgcccttctaaaagagaccccacggagctctcttaccccttcactgtatgagggcacagtgggaaggtcctctatgaaccaggaagtgggtccacaccaccacatctgctggctccttgatctgggattccatccttcagaactgaaagataaatgttacataagtcacccagtctatggtatttgtgttatagcaacctgaaaagactcagacataaaccaatttctttctataaatatatcataatatatccactccctaactgatgtttccaggttgtcattttataaacagttctattgtgaccttctctggacttgtttccatgtggatttgttgaacttttcaaagatacagaagaagtggaattactgggtcttggggtacaaacatcataaaggttggtaggcgttgccaaattgctctcagtttgctttcagcaacaatgtgtacaattcttattattctgcatcttctcccactcttgacattgttgggcttttaaaatttgctaatctgatgtattgaaaaggtatttaattgtcttgatttgtatttctctgattacttatgaggttatgtgtttagtgttggtttttcctacggtttttcatcatttgggatttttttctttctctttgtattacctgactctagactttgctcacttttttgtagtgggttgttttttccttatagagtactaagtgttcactaaatattatgaatacttacagaaattttctctctccaaggctatttattgcctttaaacattgttttttggcatccttcatcacagaatgtttaacatcaaatttctcaattttatcttctttccttcttcttcttttttactttatggtttgtatttttttttgtcagtccctcacttaagaccataaaaatagtgtctaaaaaacattttttcctaaatgttttaaagttaactgtaattctcttggaattcatttttggatatagtgtgagttagtgatctattttttttctccatatgggtaacagttgtctgcgaaccacctattagtttagtttttgttttccccatagtttgtaatgctatctctgtcacataccaaattcccacatgtgtggggctctctctattgcgttagtctagttatctatatttacaccaatactatagtgtcttaattttatggcataattaagtatattgtatatgtcttgatatctggtaggacaagtccccatattattctttttcaaagttatcttggctgcttttggaccacaattttaaaaccggttacaaatatccatgaagaaaacctttctgggatttttatatgaatttcattcaatttatgtattaattttaggggatttgatgttgaaattgtggaatcttctcactcctgagcatgagatatatctctgtttatttaggtcttatgagtttcaatgaagttttataatttttttttccatataggccttgcacctctttctttagatttattcctaggtacctcacaggtgtaagatctctattgctaatgacatcttatgaaaattacattttctaattggttgttactgatgccatggatgtttgtatattaatcttgtctccagcgtccctgccaaaccctcttatttcttgtaattgttcatagtttctcatggattatctatgtagacaatcttatcatttgcaaataatgccacatattcccccttcatttctaattctgattttcttactcctttttcttgctttattacatcagcaaggtatctcatacaataatgaatagagtggtgagagagaagacatatttatctagttgctgattttaaaggaaatgttcctaaagtttcttgtaggttcttaggagaaacttccttctgtttctgttggctaggtattttattttatttttaaattgtgaatgggggttaaatttgttaaatgatttttctgcatctattgagatgattatatggtttttccttcctaatttgccaatgtggggaattacattaagattttctaatgttgactcttacttgagcttctgggataaaacctactgggtcatctcacacacattccgtatatttattgtgtgataaacatgatattttgatagatataatctcaaatatgtatattaaagaaatactatatatttgtgcacacactatactgctggaatttttgctaattttttttttcagattttttgcattgatactttaactgagattgaccaatacttgcctttttttgtattgtcttagtgtttttctacaatgtaggtttagactgaactcataaaaatacattcaggattctttgttctttttccatatttttatgtgtcaactttggtaacatatttttctaaaaggttttccattttatctgtttttagatttattgctttaaaatacagaaaagaattctcatgctttaaaatctttactctatttagttatgacccattttatgcctaatagtgtttatttgtgctctttctttttccttgctcaatcttgtcaaatatttacctattttattagtctttttaaagaatcagcctctattttgtttctattctctattgtttctgttttgattctattgatttgttgtctttattattgccttcctgctactttaaccatgtgtggaaaaaggattttcttctattgtttttgagtttacattgttgccctttctctaactttcttaaaatttttcttgtttactaatattaaattcaatgctaaacattttcttcaactgaaatttagggcttcagttgttcagtcctaaatatgttttactttcattttgatttcatattaataatttagcagtgtgcttctgaaatttcaaaatgtacttgggtttagggattgtggttttatctatctcaatttttttattgtattttggttgaagaatgtggtctgtatgataacagttctttgaaatttgttatttgttctgtggcctggaacctgttcaatttttatgaacatttcatgtgcattctctatttattgggtagagaattctcttcccatgtcattagctgaagcttgtataatgccttatttcaatattaaatcttttcccttttttaaaaaaaaaacttgagctgtcaatttcatagagatgtgtactaaaaatctcccactatatgcttctggcagatcatgtgtgttaaggaatcacaaatgtggtaaatgaaacagcatatccaaggcacccatccttgcaggaggataaagaagatcctcatggatgtgacattttagctgaacaggagtaggccaagaaattcttgcattgccatagaggaacaccggagactgggtaatttataaacaaaagaggtttaattgacttacggttctgcaggctgtacagtcatggtgccagaatctgctcagcttctaggaaagccacagggagcttttactcgtagcagaaggtgaaatgggtgcaggcacatcacatagccagagaaggagtaagagagaggagacggggaaggtgccaaacactttgaaacaactagatgtcatgagaactcactatcacaaagaagacaccaaggggatagtgctaaaccattcatgagaaatccagacccatgatccagtcacctcctccttcagcattggggattatatttcaatatgagattcggggggacaaatactcaaatatatcagttaataacagaggacttcattctaaatgcaaaggcacacaatcacaccacctaaataccactttcctgtattctattttcttgcatatttttgacattttcattgaatacctcaatttttaaaataataaattgaatacatgtaaaatgattttcttctatttttaatgtattaagttcaatagagacataaaaaataaaatataaataaataaataaataaaatctcccactataattttgaattgttactttcttgtagttaattcaatttttgctgtaaatatttgacactgcgtcatgaggcatacaaaaggattctggtgaatatatcttcatattaacaagtgatcctctttatccctcaaaatgcttttggctgtaggccgggcgtggtggctcatgcctgtaatcccagcactttgggaggcagaggcgggcagatcactcaaggtcaggagttagagaccatcctcgccaacatggcgaaaccttatctccactaaaaatacaaaaaaccagttgagcctggtggcacatgcctgtagtcccagctactcgagaggctgaggcacaagaattacttgagcccgggaggcggaggttgcagtaagcggagatcatgccactgcactccagctgggcggcagaacaagattctgtctcaaaaaaaaaaaaaaattgcttttggctgtaaagtctgttttatcagatccgttcatttattcattcactgattcaattaaaataaacatttattgaacatttattgtttttaaggaatgtcctaaacactggagatacagtagtgaacaaatgagaaagtccctactctcttggatctgagagatcttatattttatttggagatcacagataataaacaaacaaaatatataatttgtcaggtggtatagtgctataaagaaaaataaggcaaggtgaggtagataaagttatgctggggggtataaagttatgctgttctatatcatgtagtcgtgggcagctcttggattagttgacacttgagcagaggcctgaaggagccacctgatgtttatattgcttatataaactgaatgtttgtgtcccaccaaaattcatacgcagaagctccaacctctaatgtgataatatttggagatgaggcctttgggaagtaattaaagttacattctctactgtgtattccatgcttattgggtggagtgttctcttcccatgtcattaggtcagaacagcagggccctcacaatggcattagtgatcttttaagaaaaagaaggaagagatttttctttctgtatgtacacctgaggaaagaccatgtgaggacacagcaagaaggcggccatctgtaggccaaaaagagaggcctcaccagaaatgaaatcagccagcaccttgattttggacttaccagcctccagaactgtgagaagtaaacttctgctgtttaagacacctggtctgtggcattttggtatgacagcccaagctgatttgtctaatgactataccaagttcttgtgagcatttccctatggtattgctttctcttcctttatgttaatccttgtgttttaggcttctttcttgtaaagagctggagttttaaaaaatccaatctgaggttttctgtcttctaacaggttaaagtcatttatatttattatgattactcatatatttggaattcactaggagcctgaatgttttctatataccatgctacttctttacttgttttttcttcttattctgcctcacattaaattacttgactttttcttacactgttttccactgatttgtaatgtatacattttgtcctattgttttgacagttgttaccctcaaacattaaaaattatatttgagagctgggcgtggtggctaacacctgtaatcccagcactttgagaggctgaggcaggcagattgcttgagtccaggagttttgagactagcctgggcaatacggtgaaaccacgtctctaccaaaaatacaaaaaattagccaggcatggcatgcacctgtagtcccagttcaaattccttcttactgaagtacatccttgaatagctatttcattaaggatttgggaatattaaagcatctcagtctctgactgaaagtatctttaattcactcttggtcttgaataataatttttctaggtatagaattttacatagatatcttccctcagcatttgagtatattatttcattaccttttgatttgtgtaattgataaggtgtagtctgcttcaggctgtcatttatttagagggttctctctctctctctcatattgctttaaaatttttttttgtttttatctttggtgatctgcggtttcaccacaatcctgcttgggattcaagactaagaattcctgacattcaccgattctgaaaaattttgtcctagtctctgaatattttctctcctcagtcctctatttatctatctgagtcctcttttatatgtatattggaccttgttattctctttttcatgtctctgaatgtgtttttcagatttctcatgtctctcttttttgtgttctatttttttctttaacatctccctaccttttttattcctgtccctccaaggtaaccaatgttaacacttggtatgcattcttctacatgtttctccaagctcctataaacacatgcacatatatattcatatatatcttaaataagggtgttttgttactgttgtttgcaaaaaaaatccaatcatacagcatgtattttttcacaacttgtttttctctcttgatagtacatgaaggataatctccagataaatggatacaaatttaattcatttttaaaaatagctaagtaaaattccatgttatggctatattatagtttattcaaccttctccctattaatgagcattcagattgttttcagttttatgtcactgatagggacaggagacagggaaattctgggcagaagagggtgggtcccagtgagggccccaccctcaagctgaaaagcctgataccatggtccaaagggagaatttacatccctgttttcccactcgaatgttgccttttccaaaaccacccatggcctgccctgcctcccatcctgagcccataaaaaatccctggctccactggcagagagaagagaagcagctggatgttgaagactacagttggacgttggagagaagtggcttgagttcagagggacagtttgacggtgtagcttcagacaggagtttggccagggatggctggacttcaggggaagattaccttccatccccgtccccttttcagctccccttcctactgaaagccactttcattggcagtaaaatcctctgtatttaccatcttcagtttgtttgtgcgacctcatttctcctggacgccggacaagaacttgggtgccacaatgcaggtgtaaaatgctgtgtcacactgaccgcccccactgagctgttagcacttaaggcgtccatggatggcagagctaaaagagtactgtaacctgtcctcttgggcttcaggggttgcaggcactgctccagacgctgctgtggggctggtatggaattcgctccttccagcacccaaaaagcactcacctggctcctgcatctactcacctgcgtgctccacctccgtgaggggtggagtgcagcatgtcttcatgagtggagttcacccctgccagtgccagagtggctggcaagttccagcgcccatgcactccagttcccacccatgaagcgttcagggaaataatcctgcttcatcaccacaaacattgtggccataaacatccttgtgcatatttacttatgtgctggttccttaatttctgtggaagccaattcaatgccactttacttaccccagtccctattctcaaagaatataactttgtatattttagctttttcttctagcatatatatgtctctgcatttctaaataatgtatatactgttatcttttgtttcatcaattttatgtatatcttaaccttatattatagtagataaaaatttacctgtctgatatgatcatatccacagcttcctctcccctctttctcccagtgtagttatattacaatttgggggtaaatcagcccctagtgttttcactattttgtcaaaataaatggcattaacagctaaacctttaacaatgaagttaatatctgtctttttttcatgtccttaattgatctttgtacctggtacagacttttcctctatcttccataggctcacagtacctttttccacaaagctgatcacattagtaatctgtcagttctccttcttttcttggtgatatctctgctggagacctacattttccttctagctagacttctctctcggcctgctagatagctgacatcctgagatttgtcttcactgttattctagaacttccctttgccttttcttctgtgttggattctctctcttgttttaccccattgtttgaggaagcacagcctccagcagctatcagaattaaaacctggtgcagtggtaacagccttcatatgccttgctcttggtctgctggccctgtctggatgactggtcctgtggctgagccagtcatcatcctggggtatctcacttcagtgccgtcatccctctgttgtggtcctgtgttagttctcataaaactccctttacactctctcatttctgtggctcccagcttacagtagcctatggaaaatggatccctgagagacacattcacacttcacatgtctgaaattgtcttcattctgttgtgtcacatgatgacttgtctgtcttgtacgggaaaatccaggttaaaaaacagttttccccagaagtttgaagatattgctttattgcacgcaatctcccaatgttgctatcagaaagctgccactgttctgattcttgatgttctgtgccttaccttatttttcttttcccctggaacctctgatttttcctgtccccctatattctaaatttcacgatgactgttctaattgtgggtctgttttcacctgttgtactcagtgatcattgtggtctttcaatctgtcaagactgtgttctctctgtaagctgctctttctttccagaacttctattatttgggagttgaacttcctggacagttttgtgattttttcatattttctcacctgttttccatctctttatcttttttcactctttttgtacaatttctttaacttcaatttccaacccatctattgggttcatttctgttaccgtcttaagtttcctcttttcatctataaatagttttttaagcattctgttctgttttcaggatgtgtgtcattctcttagttttctgcatttttttttcttttcagaaattgtctttgcctctcctggtctctgtctcctccatgttgtctttttcagtctgtttgttttgaactctgtctttcctgtagagactttccttgcatgtcgggcagtcctgattgtctgaccatatttaagaatgaataacagatgtattgaaagctctgaggatgcgtgagggacttgtcaactctgagcatcactgtagaataaaatgtttctgtcataggttggagaactcctaatgctaacaactcctaaagtctcctaatgggaaaaccagggaatggtcagattctccagagaacactcttccagactcctggctgcaagatgccgccctgcctgtcccaggctgggagctgagatgaggaatgagactggagggttcagccttcagcatgcatatttccttttatttgatgtgtggcatctcccaattccaaaatcctctcccagagttcaaacctccagtattagcagttgtgataaaggctgctgcctagcagggtggattcaaggaaaggatccagggatctaactgattcttaaacagtttccctcacattcttctttatttattttttttttttgaaacggagtcttgctctgtcgcccaggctggagtgcagtgacgccatcttggctcactgcaagctccgcctcccgggttcacaccatgctcctgcctcagcctcccaagtagctgggactacaggtgcccgccaccacgcccggctaactttttctatttttagtagagacggggtttcacctgttagccaggatggtctcaatctcctgacctcgtgatccgcccacgttggcctcccaaagtgctgggattacaggcgtgagccaccacgccctgccctgttcttcttattttagtgactcatctcccttccgcacagttccagaggtcaccggtgctatctgttcctgagcctttggaggatccactggttgttcctaactttcctgctcctcactgaggattcagcttcctttgtctgttaattctatcactgcttctccatctgctttccgtcttctaaaatcttattactgttatttctaaaatcttgttacttgttaaacctacaacatactaaacaatcctggaattggttgtaaaagggtcatggattgccagagatcaaaaggtatttaaaatctcctctcctattgtcctggtggttttatgtcttttaaaaggtcatcttccctcgttacagtgacgtttcaggtgaaagccatattagatacagtgtgttcaattctccatttttgcttggaagtcctgtgttacattttggtttaattttctcaaggctgtcttccggttcactgatggcctgttttgtgttactctactgtctaacctttccattgagtgattactaggagttctactttattttttcaaatctgcttattctctttttttcatgtaatcctaattttctccttatggcttttagtctttatcactataatatttttaaacaatcttattttgtactccatttgagattgtatctttccagttcttaggatttaaagttttttttttccctttatcactgtccctcatggcagtttatttgtgtgtgtgttggggggtgatactggcagttcaacctcagatatttttccttttctttgtttcttttttctttctttctttcttttttctttttctttttttttttttttgaggtggagtctcacttagttgcccaggctggagtgcagtggtgcgatctcggctcactgaaacctctgcctcccaagttcagatattactcctgcctcagtctccctagtagctgagactacaggcatatgccagtatgcctggctaatttttgtattgaaatgggatttagccttgttggccaggctagttttgaactcctgacctcaagtgatctgcctgcctcagcctccaaaagtgctgggattacaggcatgtgctgccatgcccggcctcttttctataggaatcttgtgagtcctgagttgtgaaatcgtttctacatagtggacatatgtttgtcttttctggagatctaaggactttcaatgatcctagaactgtgtttgtattaatttattgtcatgggattcccctactcagatacacaggtagtataaattccgatcttacaactgaaagtggttcatgcttaaggttctgatttcccaaaggtgtcctgagctagggatacaagggaatgttctgctctttatctctgaggcagtgggcagagtgctttagtccaccttttcatggttagggtgactttttgaggctttgagatttaggaaaggggctcagttctggccccgctacctcatgcaagaccaaggtcatgtccctgcatgggcattagaatctcaccactattcccagggcttcgggagcatttgcgagagtctgaaacttccttgagcactgtgtagtcagccttacataaaagctctggcttcaattttatctttatttctggggcctctgtttctctcccttcctctatcccccttttccttccttttttccctttttttcccccaaacttaactctgtgatattttcttgggaatttcacatccttgtagtgggaagggacccatatgattaacctgttgtttgccattttgctgaaaatgaacactcacatctaattttgtgttaaacctggaacatactaaacaaacctggaattggttgtaaagggtcatgggttgccagagatcaaaaggcatttaaagatccgttgtccaaccctagcattttacttaaggaaactgagcctcaacactgataaaaccacttgcccacagacacgtggccagttagtggaaaaggtgggactgacctcaaagagtggtcacttttatctcacagcatcacaaggaggaacatctgacagcacttgccaggttatcaagacaccaagatccaatgcttgttgagccttaagtcactgagacattttggaaaagccacatataccatttgtgtttgtcttgacttgctgttgtgtttttctcttcttgaatacagagtagtaatgcttgttgaattatttaagtggcttattgctgtgccagtttgtttgtttttctacctttattttttcaaagaaaaacgcctttttttttttctccttgaagacatctttcaggatccatcacctaccggaaaccttccctgaagtctgaagctcttagagggtttttcaccttttctagctccttttgaaattgtcatttgaaccatgtcattagcaccatatgatgaattcatctgatcctctttaattgttgaatatgtatgtgcttcatctccccaagattgtaagtgctagcttgcagaaaccatggcttatatatctttaccattttccaaagtgttttcctgtggatgagttgatgacgaaaaacctagaggaaatatgttcttttagatagagcctgagtttggtgtcaggaagcctggattctgccccatttctctgctccctggtagacctatgcaaaccaccgatgttgtatggagaaactactggtgtctgacaatagcactgatacagtggttgtaaaatttttcatgcaagctgggacagttttcagagtgaaagggggcaatggtaataattgtgcagggacaacaggtataaattgggactttccctaacatgctgggacagacggtcaacttatgttctagatcaccttgagctcgtcagaactatttgcacagctgctcttgataccagtctttcaaacaaaaaattatcatcccttacaaaagttttcatccacgagcccaactttacaggtaataaaatttttagtttttccagacattcttgttttttcagctacttccatggctccaaatgcgcattataactgaagttaaactagattgtagatttgaagattagtactgctgagtaacaaatgccttcattcttctttatcaaccactctgtcttctggaaggaaataaaggccccgatttctggagttctgagcctacttttcttgggtgcattttgaaacatacggattttaccgctagtatattcagtgaggaaggaaggcttctgaaggattgatgatccccaaactggattatgtgttcatgataatggtgtatttggtggcctagcatagtgaggtgaggtaggtctttaaaatggctcattataaacatcattgttcctgagctcacttgcccttgcatctcctgccagagtgctttgtacatagtaggccctcatcaatgcttgtagattttaaattcggaggcacacttggaagacaatggtggctggtaaattaattatcagggttagcaacttcatttctgcttacgcttaaaaagtgctgcgtgaggaggctgagacaggagaattgcttgaaccagggaggcagaggttgcagtgagctgagattgtgccactgtgttctaccctgggcgacagagcgagaatccgtctcaaaaaaaaaaaaaaaaaaaaaaagttctgctgtggttgatacatggtgttggaatgcaaagaaaaatagagaagatccctgccctccagaactttgtgacctagaggcaactttagaaccataagccactaaaatttagaaagttcaggagaaaggacaatcacttttgacttggaggaatgaggtagcacttgagctaggtttgaaaaataagatttttctctaggactgaggtgagagaaggctgttccacatggtaggaacagcacaaacaaaaacctgcaagagtaaaattgcaagccatatttggagaatcagaaaaagcctggtatgttcagaagataagatttaatgatgttggtttggggaagttagaagtcctttaatgtcaaatgatggaactcaggttatgttatatagaaaatggagtcacataaagtgttggatgagtgcagtgatatcaaccaactcatgctttagaatgagaacctggttgcagggagaccagttaagaagaggcttaggtgttcaggagagatataaaggcaggagaagaaaaaggagccagaaatgagattcagaattggcagttgattgaaggaagggccaaggtggagagaacaaccaaacacaatcccaagggacagagtggatggggatgagtggagggggatgagtagatggggatgagtggaggatggggatgagtagagggggatgagtggaggatggagatgagtggaggatggggaggagtggaggatggggatgagtggagaatgggatgagtggaggatggggatgactggaggatggggatgagtggaggatgggatgagtggatgggatgagtggagggggatgagtggatggtggtggagagacacagagaggatcagaatttgattggccaagactctggatttccagggaggttgtggagagataagatgaaatagtatgtgaaagaactttgaacaatgctttgcataaaggagatattcaatgaacattaaattgaaagaaaaagggaaggaacgaaagaaaaaaaagaaagggaagaaggagcttttcccttctctctacctctctgctgtgccccagtagggagagacattgagggttttaggagatctggtgggcatttttcctgggctgttcctaccaatagacttgctgctggtttcatgttagttaggtggcacaccaagaggggactcagaaagaacagaagatcagaacttgctggtgtcagacagaaaagacatgagcttgagccacatttgaagaaagaaagagaattgggttgatgaaaaggccatactgagaattatgggagtagaagttgtgaaggcaagaaggaagacggaagaaaacacaccaccgatgcagagaaagagaaggatgctgactgaccttggaggcagtttctgcatgttctggggcctatctttctatccttccctctatccctcccttccttccttttttccattcttctatttttctgaactcaactctgtgacattttcttgggaatttcacatcttcgtagtacaaggaacccataggactaacctattgtttgccattttgcttaaagtgaacactcaacgtctaattttgtgttaaacctagaacgtagtaaacaaaacctggaattgattgtaaagggtcatggattgccagagatcaaaaggtttctaaagatcactttgtctaaccttagcattttacttaaggaaactgaggctcaacactgataaagccatttgcccacagacacgtggccagttagtggaaaagctgggactgaactcaaaggatggtcactcttatttcacaacatcataaggaggaggcctgtcatttggcggtcagcacttgccaggttgtcaagacaagatttgatgcttttgggaaatgtgggtgaactattggggatcattggaaggagaacgttgcttaccttctgaccagcctatcctgaaactctgttaggaaaaccctactactctatgaaaacaaacccagtttctcctcatttttttcctgaccattgggaataacagcaagacagtccttttagtgattagaaaccaagtcacattgactttttctgacaagccactccaggataactctcaataaattattttattggaagtactggctggtactttgccttacagaatgcctttcggtttctttgtcttgggctttgattatttggtaaacatttcagtttcatgatgacgtggtgtttagatggcaatgcatgaattgcattactaaaattgtttgccttcagttatattacatctgcttcaggaatgctagagaacataaacacagtttatttactaaactacctcagttggagcatctgagagagagaaagcataaaatctggtggttggcatggcgtctcatctcgagtcagagaatcttgaagctgggaggttcttttggaagcctcctgctgccgccttcttcaacgtgatgccaccatcctccccctgaatgtgtctaacaaaaggcagttctcagaatgtgccaactgttagaagaaggaaaaccacaattgaatagaaacttttaaattaatttatcctaacatggatcgtagatttgttatgttgactgcactgcaaaacgaatcaagccagaatcacattggaatctttttttggtgtgcaaaatcccagtgtttctttgaggcagtgctttcagtggtgcacgtctctcctgtgcagaggaaggctctttacatcatcttagcacagtgtcttccacttctgtggtttctatcacttctattgccttttcccttggtattgtacctttccttgatatgggttccaagatgtagctgtacttaaagacttgatggtaaaaataggccagtctctaaagcaattacagttctctgtaatttttggatcctatcaaccagctttgacatttggttgaatgtgtttttgcagacatcagtgtaaactttacagagggccactgagccttagcagttcttcctaagcaaagtttcactcattctttttttttttttttttagaaaacatttaaggcctcctatgttcctttcagtgttcgctgtttcttctttatctggggtccttactgactcaccttgacgttactgattcataaatggattttcatttcttttgctgggggtcagcactttgatgattatccacttccacttccactgtgttattttttacataatatttttgttctggttacaaaagcaagatagaatttttgcagaaaaatccggaaaatagagaaaagcaaacagaagaaaaaaaaatcactcataacccaccaccaaaaacaaacaaacaaacaaaaccacagccctattgttaatatgttgataggctcctgtctttgcctagcacttagaaccctcctagtcaggttctaaattaactttacaacctcatctccctgcttgcacctcctctggggacatacattgcctggcataagacttttcatatttctctctcaatgaattttttctgattatgtaaataattcatgtggttgtacatatttccaatagtacctataaggaaaataaagtaaaaattatttttaaaaacatttcaccttattaaaaaaaatctcaccaccctgaaataaaagccattgatattttggggaccatctcaccaccatgtgtttatgtcacctccacacacatgatttcccataaatgagataggagcacccatgcggttcttatcatggacacttgctttcatttttcacttatttacttttttcctctcattcccttccctccttccactctaattcctctcttctagattgccagtggcatcagccttgtctgtgtccttccatactttatgcttctacaatcttaccaaatgttttgtagtcacaaatatatgttgtgattgttttttatacaaatcagatcatatcatatgtccctttatgcatctttctttttctcatttaacagtgatagattgctgaaatccctcttttgttttttcatgactgcgtactattccttgattgactgtagcatgaattattgaatgtagctatgacaaataatactgtaataaacatttctgtgcttacaggacgtgagatgacttgattaagaaaagaatagatttttagattggaatagacatttccagattgctttctaaatggcatggtgattcgtatttctaccagcaagtctttctgtatcttgccaagggacgatgcctctaaattgcaagaaagggtgggatgccttgtccatttgaaatccaaaacatcaagacaaatatggggcaataatatgaccatcacaataatatatataaaagagaattcattaagggatgattatcgctttctagagttgggttctggggaagtattatttatagaaatgagccttaggaggccaggcacactggctcacgtctgtaatcccagcattttgggaggcagaggcaggtgggtcacttgaggtcaggagtttgagaccagcctggccaacatggtgaaaccccatttactaaaaatacaaaaattagctgggcatggtggcacatgcctgtagtcccagctacttggggggctgaggcatgagaaacacttgaaaccaggaggcggaggttgcagtgagccaagatcgtgccactccactccagcctgggtgacagagtgagcgtatgtctcaaaaatagataaataaataaataaataaataaaaaagaaaagaaatgagccttagggcccgaaatgtaattttatttttagcatgatttttttttttattacccgacagtttttgattagtgtggcagctagaaatttccctcctggtttaatttgcttctttatagtttttgtcaaaagctcaaatggtacaacacatcacaggtgacttttcaacatttgagtcaaccttgaaaatacacagatggatggatgtcagggtgagacctgacttcaagttcccatgaatgtggtttatattttaaacactttaaaaataactgtgtatgtcgtggtgtcaggagtcaggcaggtggaagggttaggccttccaggccatcttccgagctgcaccggacgtttgtctcacctcccctacagagatggtggcacagtccaatcccttttccctcctcactgggtgtcctcctccaattcatggattgtctgacactttctgcactcgtccctgctgctggtgtctgctggcacttcctgtccttcttgcttcccatcttccttgtctgttctgcccctctcccttccatttctcccgtatttcttagctttatcacaaaaaggcttgggcatcacagccatggcccactcttgagattgcatttcttggccagcaagcccacctggcctcatcattttggctgcaacttcaaggtcatcagcccatcttagctctgttcatccctaagttttctgtggataggctttctatttgacagagtgcttctcccagccccctcttaatttctttatctgacactgttttttgggacctagaggtccctgagggcctggggcttccttgtgcgttgaggtgggccctgtagattctgccgtcgagagaactctgaccagcccgctctgagaaagaatgtcaagtggtcagggtctcaccaagcaaagggcctctatatgataatggtccacagagctgtcaggagaacaaatggggtaatctggagtgtgatttcatcattcttcagtgcattctcagtgccgggaaaagtcatgagtagggttctcgttttaactcctaaattatgaacttactcacatttgtggattagacaatgcctcaacatcattttcatagtgtgtgtgtgtgtgtgtgtgtgtgtgtgtgtttatgtgtgtgtgtgtgtgtggtttaatgtgtacaactcatctgaacccagttgctctgtggtttatcttttactgagaactgctttttttcttccttttctaagaaaatactagttcttaaagtatgaagtctttcttgtgagttcatcagcagtgaggggtgtggtgtgaggacctacattggtgataatgagatccaacaatcactgaattcaggcgattttgacacaaatcatattgactaaaataatattaagcacgtgatgctggtgacatttgaatatttgccaggaagaatacctgcatggtaacaattggctgcaaatggaagagatttgcatgttttattgtttttacagttttaacatacatttttattggagaatctgaaaccaacctatgtaggggaggttatgggagcaaaagtaacacagagaaccagcaggaatcggcctacctgcctgcctctgtcctcctctgctcctaagaatttgggtcacctctggcttcagcacttagtcctaatcatgaacaacacatgagttaggggaaaggtgtattcacaaatttgaaatttctttatgtttttcctctctcacattcctttcctgcagtctctttcctactttttcatcctttgtgtaaaggtagcaactttttttttgttttttgagacagagtctcgctccgttgcccaggctggagtgcagcagtgtgatctcggctcactgcaacctccgccttctgggttcaagtgattctcctgcctcagcctcctgagtaactgggactacaggcatgtgccactgtgactggctaattttttatatttttagtagagacaggatttcaccatgttggccaggctgctctcgaactcctgacctcgtgatccgcccgcctggatctcccaaagtgctgggattacagttgtgagccaccgcacccggccaaggtagcaacttttatttgagaaagcttggaatcctgacctaagctccctgagttcccactgtggcttgtggccacctattgtgatactcactctctacccttggttttctgatctctaaaatgagactgtctacttcacgtggctgttaaatgcatcataatttccttccttacctcccttctttaaaggaaacttggaattttcaaagctactaaatggagtttttttgtgttttttttgttgttgttgtttgtttgtttgtttgagacagagtctcgctctgtcgcccaggctggagtgcagtggcatgctcttggctcactgcaacctctgcctcctgggttcaagcaattctgtctcgcctcagcctcccgagtagctgggactacaggcgcccgccaccacgcccagctaatttttgtatttttagtagagacggggtttcaccatgttggccaggatggtctcgaactcctgaccttgtgatccacctgcctcagcctcccaaagtgctgggattacaggcgtgagccaccacacctgacctaaatggagtatttttagggccacatggttaggggcaactaaaaatgtcatatgctaccattgcattcatgaacaccatcctccctcagagaagaaaggagtcacatgactgcatttctggcgaaacctgattgcattttggtaaaacctgtgccaggaccaggacagtcatcaatgacgtgttccctgattttcatgactgaagagcttcaggctggtgctgccgcaggggacctttgcgtggcatggctcctctgcactggcgttagctgtggtgagacacagcttgcagccacagtaggacaatgccaagtccaatggtatttgctgttcaggagcaaaagaactacacagcaacaacacatactatcgtcgagtacctatttatttcactgtatgtgtctgaaggactaaatcgaagccagagccccccgcccatgcaccaaaataaaatgcagacagtgttgagttaccaaaatgacagtgcacctgcaaagggaagtcagtgaaggtttaaaggtgaagacttaaaaatatatagatagcttaaaactgcaaataaaaaaatgtcacatagagattttcatgagcttagaaaaccaggaggagatttgagtcgagagaaaacaaggccagcctctctcaagtggcagatttctgcagtctttggaaagatggaaataaatatggccaggcgcggtgggtcacacctggaatcccagcaccttgggaggctgagacaggcaggtcacttgaggtcaggagtttgagaccagcctggccaacatagtgaaatcccgtctctactgaaaatacaaaaattagctgggtgtggtgatgcccacctgtagtcccagctactcgggagaatcgctggaacccaggaggtggtggttgcagtgagccaagatcgcaccactgcactccagcctgggtgacagagtgagactctgtctcaaaaaaaaaaaaaaaaaaaaaaaaagaaatgaaaagaaaaagatgggaagaaataaaagctgcaaaaggacaaatggacagattcagggcggaaagcaaggacagagcaggatttgagcgtgagacttgctatttgggcttaggtgaaatgaaataaagaaaagggctggagaagtcagaagtgggtcacagaacaatgagatggtgaatggggtccaaagtgtgggtcgccaggactgccaggaggagccacatctccagggtagggctaagctgcaagcaaccagcattatttagcagagtcctgcagaagtgaatggaaagatctttaaaaaacctatgaatggcagtggaaaaaaaagaactgaaaggaaagcagaaggcttatgggctagataaactcattctcagacatatgactgaactgaaactcagataaaatattatcttttcatccagcgtctttcattcgttagaagttcagtttctttatatttcattcatacaagagcaatgcagatttttaaattaatatatgtgctcatagacatgtggatagaaactcattgctgattagaatattatgaattaaggaaattttaacaaaatatacttggaaagtataatatgggattgaaatttgaagccaatgataagattataaagactcagagctaatctttcatgcactattttgtaaagaataaaatattattcttccttgggcctgaagtccacactagccccctcactaagatgataaccacaggggtgagccctgagatcttccacccccaaggcctccactaatcgccatctggacatttgcttttcgtcccttgtactgcctgttctccacctgaacagtccagacacttccagcatgttcactgcccacaagtttacttaggaccccgaagtcctagaaaaaagttgcctttagcttggctgctcctttggtctgcactgtgtctcctccccatgtctttagcttcctcaagctggatggtttcttcctgactgcacagcttcactcccaactgtccctactgccaccctccaccacaccaggggctcttcttttcccaggtttttaaggaaacactgtctttgaggggatcatgcaccaatttcagcaggtgtctggagccataacattttactttcctgtagcagttggaaagatctctctttaaacactagaccctcttgatcctgttaaacggcctgattcttccttctgtcttggtgaccagtcatctctgtccaacatgccagcttctctgtcttcccccactcaggtaaattcagacatttgccccagcctaggtcttagcttcctcgctctgtttcctctgtctcggagatctcacctactctctctaatccttccaattttaatgcaggttgttccaaaacccatatctccaggcctgacacgtctcccatttccatcctgtatgtccatgccaccttggagaatcccccaccatttcaaaccaagctctgcctctccctccgccactaacagtgtattgggtacagtgtattgggttgaggatttatacacttctccctagcattgccagttaggagaccacctgccaatgggaaccactagtcctggctccccacatcttagtcatcttcagttccatcatctcactttctttgtatccgtacacagactaacacttcatttcccccacttccaaccctgtcctcatggcgttcctagaaatgacataggcggacatctactaaacccttacttggtctgtataagtggaggagttctaggtgaagggaacaaaagcccaacttgcaccctgaaaacagagagtcacggcccctcgatcaattcacacacttgcaccaatttaccgacccagaagcccttgaatgaagaggaggccgggtctccttgacgaaggaccctaccacactgtcaagaattaatactgttgctttttctcccagccttccccaaagggacctatagccttttgccagggtgactgtgcactggggaaaaggaattaatcagaccttttggggactactggtgactggctctgagctgacactaattccaggagaccccaaacatcactgtggtccagcagtcagagcagtggcacgtggaggtcaggtgatctctggagttttcacttcatgtttgtgtccatccccatagcactttgttcaggacaacgtggcagggcccacactgctgcagtggattcctggaggcttgtacctcccaacccccaacccagagctgcctacagccacagtattattcagtccaaagcacctctgtgacaattatattcctggctctaaacttccactggtgcccagttgttaggaacaatgcagctttccttagcccgatagttaaaacccttcacaaagtctccttcccctttatttccagttttcctggctataaatcctcaacccaatacactgtaccccactccccccagcccccagatacaccatcccccaacacgaaacacttaccctcttctcagctttgcctttatccacgctgttccctctgcctggtatttccttttggctcctttctctggatttgtgtggtgcctgttttagcacaaatataccatgtccccttgtaaaatgtcttttcttcacttcagctggtaacagccagggaaatgagcaaaaacgtgtggatagattaattcaccagcatcggggagccgggtgggcgggggtggggggtacagtgtggcgcagggcatgtctttctgtgggtaggtcgttaacaattttcataaacaaaagattgccttgtttatacctgttcatcagagtcagcatttcttaaatctgtttaaggtgaaagtgagtgctttgtgttttaaaaatcatatgggaagcacagaaataggaaatgttcactttgtttaatgtggaagtatattccataacaggtggcctctcaacttgcacaaataaaacaaaattggttggctaaaatctatcagagaagaagaggaagtaatcgccaggtggtaggaccaggagcagatggggactatttacttagatcctcaattcttcttgttgagtgtccctctaattaagtacctttccttagatgttaaataaactttcatatttttaaatagtattttttttagaaaagtgtattcccatgccagtttctccttcttccaaagtcaggggtagaataaccatatagcattaatagagtctgtgtaagcttaaatagtccaactttcctttcaggctttttatttgaagtttccaaattacacagctaaaataaaaacagcacagaatttaaattgagaccattatatatcgcagggacttcccccacccccatattaagtaaggcagtgtcagccctggtggtccgtgcagactcagtgcactggaggcagaagttccaggtggactgactcctgcccccacccagacctctggtgctcccaggcagtctggaacaatcagactctggtgctcccaggcagtctggaacaatcagactctggtgctcccaggcagtctggaacaatcagagttgcccttggtcttccggaaatactgtaattccctgtgcaatgttagctcttgaccatctttgaattctttttcttagacttacaaggctctgtcgctggtttccctctcactcttctgacgactacatttcaacttccttcaacaaacacttatgaagcatttatatagcacttactgacggccacagccaggtgcagttttgtggatctgtacacaaatgaattagatgagccggtgcccatcggccctggggttcacagaccaaggctcgctctgccggcatcctgggctccctcctgccgcctgcacctggaacgcttggcggtctccgtgcctcttctccagttctctcctccactgtgctcctttggaaaggcttttctgtcacggcttcaatcataaaactgtattcctagtcctatttcctcatctgaggtgaagcatgaaatctcctcttgtttaccccgaattcagccagctcaccacgagccctctctgcatctgtcagcctctgtcagcagctgtaaaagcttcccttctccccagacccccacatctggaaaccgtctttaagtcgtcctcccctttttactgtgtgtccaggaatccacttttgggcttcctctgaccggcctcttccttccttcttttcctcctccccgccccactgcctccacctactctagtcccaaggccgtgcccctgccccaaccctcccactgtgctcttcccacccacaccagagtccccttctttaaatcctgtccgatcagtgtcactctcattaagtgacagagatgatgtctccaccttttatatctccaacagcatctaacccaacacctggcacttactagaggcatcaacgatgcttgttgttctgtgtggcgaaggcacacctggattctggatggtcagtctcagctctccatctttgctgcctcacagggactccaaatgtggagcgtctcccactgcccttaattagggaaattcagcctcgcagaagacagtgaaactgatgaaagcattgggaaatggaacctaggaaagttaaagaattggcatcatttgatgtgagaaagagaagcgaagatgatgagagatcctagggaaaaggctacatgccctgtctttcttgagacaagcgtgtgcacttcctttgcttccactcttacttgtgtttatccttggagggacctttaattatctaacgcttgggtattggccacggtgcttatcgtctgcgtgtgaatctggacatggtccccaagctgtgtggtgctgtttgttggtgcggtccaggatgcacagggctgagatggtgctgcatgcacacttaccgagcacatccccctgggagaggtgtggacaccaccgtgaagggggcccagacctcctccttaaatgcctgcactttcacagggatcagacatggagacaagaactctcagaagagggagaggcctgaggcacagcaggaaggtacaagttcaaaggaagtgaagatttccagtgagagctatcagactcttgaaatggactacagggaaagcctgtggtctcctctttcttagaaatgctaaactcataacagaaaacctctccaccgtggcttgagtgtcaaattctctggaggcctggggatggggccgggagttttctgcctctatatccccatggtccacttattcgggtggcttagtttgctttgcaagcagggggtgggagcggggctgcttattccaaccacagtagtcaaatgtgttacttatgagaaataataaaagatccttcttcttttctttttctagaccccctctagtcaaatgttgttgtttttttaaatagaggaggttgttttgcatttttcttttcgtagtgttcgaatttagcttttgtatatactctccccagtagttcagagtacattcatgagcccagatcatgaggaatgctcaccattttcctgaaagatggtgtgtggaggatgtgtacagatagaagctaggctgttgaagattttattgaactcatcagcattaacaacagacactgttagtgaggtccgaatgtttttgtttatttttttgactcaacaaacagttattgagcaaggctttcttctgtgcccggcaagatgcttgccacttgctgaagagacaaagatgcatgagatatggtccctgcttttaaagcacttacaatctagcagggaagacagccaggtgtacaaataatcatatgtgttacaaagaaacgattattccggttcaaaggaaggctgttgttgatgaaggatggttgcatagcagaattataatcgtcagtttgaaattcaactttttcaagctttgtcatttctatcttgtattagccttatttttccctttttcaaaatacttatttgcataggtattagtcacatggttcctatactggaacagtttagaaaggtgtttattggaaagtctcgctagcacctccgtccccatccacccaattcactactcgctcttccatcagaataaggaaccattgtctattaatttcttgagtatatatccagcgcccatccatgcaaaataacatatacacattttaaaattttccctttcttacacaaaaggcagcttactgtttgccctgttaatttaacagtatatcttgagattttaccatgtaagatcttatcatggtacatcttgagatgtaccatgtcagtacatagaatgcatgcttttcctttcttcctaggtagtataatacttcctagtattgcatcgttttggagatatcagagtgtgccagttatcaattagctgcataacagattactccataacatagtggtttaaaacaacaacccttttattagtcataattctatgggtgaactatttggcctgagatctgccaagggttttttactgctgcttttgcctggatttgttcatatggatgtgattatttggggctagatggtctaagatggcctcactagcaggttgttgggagagtctgacctcagttggaatatgtgccttgagtaaaccagccccagctgcttcatatggcgactgggtcccacaaaaacagagaggggttggccccgctgtggaggttttattaagcttctacttgaatcccattggttaatgttccattggcaaaagcaggtcatggggccaagcccagagtcaatgtggaagcaatttcaggatgagaaattcattagatgtcattatgtaactatttactacccatggagtaattaaccagcccctgatgatggacacctgtttatttccagtcttttggtattgcagataatgctccaatagataatcttgtatattagtcagttcatatgtgagcagggtaagtaccagaagtagtactgaccctgtgctggatagagggcagatgccttctcaattatctatctatcctatttctgtggtgctgtttctctagatattttaagcttgtgtttttctgtcactcgtgcaggagctttgaaaatgtgaaaagactttagataggaaatgcatataaactgaattaattagaaactcactcctaaaataacaaaaaacatgaaagctagaatagaaatcaaataattttgagtaaagtaatgtgtacattatttgaagaaatacaagtatgtctgttataacaatactttacatttctgttgtgtttacagcatagaaacacttagtttgcttttagtatctcaattctcagaacaattctatgagttgaaagtataattggccccattatgtgtgtgtatgtgtgtgtgtgtgtgcgtgtgcatatgtatgaatgtatttaaaggcttagagaagttacctaacttgccccaactaacaagtaatagccagaatatatacccagccctgtgacaataaacttgacgttgtcccattaatcgcatcttactagtagggacttgtatcttgtatctggcttagcttctaaagatatacatgtgctcaacttgctaattgctttgctagtacaatcacaatcatatatgatatcacctcaggaggctctttttaaaaatatataagtagttaatttctaatttctgaataggtggggaacctccctgaagttttctcttgttttacacatgtcattggcatccaggttgagagctccatctcctgatcatagcctctagtaaatcttgacggaggaattctctttaagcccagggtcttgctttcagacttcagaaaagaggagtttttttaaataaaaccttgtctggccctcccgcaatggatgcagaaggtagactgttttctttcttttaattcacactcagacgttttcgtaaggggcttggtcctggcaaagtgggcctcacatacaaaccacccactttcctgaagcgtgattgattagcaaagctgttctgctcaagggcagcctgttttccccagcctggatgctgacaggtccgacatgcacagattttcaagcaggtcgccagtccccaggctgcaggctgtaggccaggacgcttgttcttgagggagaagagaggagaagaaatccactccgggggcaagaattaagctatattatagaattcccaagacacagcagggcaggccaacatagtccttgtttagagagcccctgatggtgttgggtgccaagaaaaccatggctgcacaagacacacagagtgaaggtgaatataaagatgtttaggcaaagcctgtgcatatggtactgatccccatttgtctaagaacctctaaacatcaaagagagttaaagaaagatagaaatttgatgcctaatcaaagtagcctatgatggaagtttggaaatacagccaagcaataatactgtaaacagaacgaggtacagatcatgtctttgcatgtttgtctctgtggcatctaacagcgtgtcttttacaagtagaatctgcataaatatatagtcacaaaatgttagagctgaaaattatcttacaaaccgtcttgtccaggcctcaccattttaggaatgagttaacagaggtacagacaggttaggtaagtggcctcagttgttctgagtcagaccaggtcttctaaatcttagtgaagtagttgtcataaaattgtgctgccagtattctaacaaatgttatgtgaatgtaggaatattttattttttttgagactgagtcttgctctgtcgcccaggctggagtgcagtggcccgatctcgtctcactgcaacctccgcctcctgagttcaagtgattctcctgcctcaggcacccaagtacctgggattacaggcatgcaccaccatgcctggctaatttttgtatttttagtagagacagggtttcaccatgttcgccaggctggtcagaaactcctgacctcaagtgatccgcctgcttcggcctctccaagtgctgggattacaggcatgagacactgtgcccagccaaaggaatacatttatttcctttttttcattgtagaatttattattattattatactttaatttctggggtacatgtgcagaacgtgcaggcttcttacataggtatacacgtgccatggtggtttgctgcactcatcaccctgtcacatacattaggtatttctcctaatgctatccctcccctagacccccaccccctaacaggccccagtgtgtgatgttctcctccctaggttcatgttgttctcattgttcaactcctacttacgagtgagaacatgtggtgttaggttttctgttcttgtgatagtttgctgagaatgatggtttccagtttcattcatgttcctgcaaaggacatgaactcatccttttttagagctgcatagtattccatggtgtatatgtgccacagtttctttatccagtctattattgatggacatttgggttggttccaagtcgtcgctattgtgaatagtgccacaacaaacatacatgtgcataaatccttctactatgaagacacatttatttcctttttaaagagatttatttaagagtcactgattccgtaaaatcatggaaagtcatctccttaatttacttatgtattaaccaaaggagattcccccaaggtactttctattaggggcggtgggaaaagggagggttataaggatgaattgactagcgtcttttgaaagactttcaggaatttgggtcttaagacattttggccatcttacagaaagtcttaaatgtcagaattgggtgaaaaaaatttaacttttctcacaatggtttgttatatgctcaaggtgcagatagcttggtagggacaattcagcctgcggttaagagtggtctctatgtgtacgtcagtaaactggctatcagcgtagcagcaggagcagaaatcatcaagaccgtggaccccccagcctgtcacttgacttctgctccgtaatgctgcctgcacattgcccatttggtgcaggttatgcctggcttgtttcaaacatcccgtgcctgctggagctgaggatgcagcggattcattagctccataggaatggaccccttcattcaaagctcaatttggcccaggcgcagtggctcatgcctgtatctcagcactttggaaggctgaggtgggaggatcacttgagcccaggagttcaagaccagcctaggcaacctagcgagaccccatctctataaaaatattaaaaaattaaccaggcgtgtcccagctatttgggaaactgaggtgggagaatcactttttcccaggagttgatgagttttctcccacccgtgttgagctatgttgcaccattgcactccagcctgagtgatagagcaagaccctggctctaaaagaaaacaaaacaaaaaataaagcttgatttgttttcccatcccatggcccactgccaactctatcatttttggctcttgactgtcttatacgcgggagtgtagggagaaacttttgccagtcccttcaaagatggctttgacaatctgttgtcctgaataaatttgaacacctgacaaaagagtgtctagaatcttcctttcctttacaaagtgtaaggggtcagatgtattgccccttttgggatataaatcagttattgttctgccagccactgggaacattttagaagcccatttattactatctgcaatggtacctcatatttggtttcctgtgtcataaagaaaaacctgcaaatacctaaaagtaaggattccagtgaaatgtgggttctgcttcactctgtttggtgtgggaggctgtgtaagtctaactctaagaataccggtagtggtatctatcttcattctaagaactgagggaggcgaggtttgtgcagaattaaatcaccctgtcatatctgtgagggcttcctgcagaacgaaggcaagtaaacccaaacaaacaaaacaggaacatgttggaaacagtcagaggtatacgtctggaactaaggttacgagctgagccttgaaaagttcatgagagactggcttgcttgaaaatatccttcgtgtgtgtgtgtgtgcgtgtgtgtgtgtgcatgtgtgcgcgttgttttgtttgttacggttttggtccgtgctaccgtatttaccccatgtgtggtggttggaaatgtcagggtttcttgattgaaaaaggaaataagagattatgccactcacagcacagaagtgggatgagcctcactatggtgtatacgtgtgcgtctgtgtgtttatgtctgtgtcatctccatgtgtttctgtgccagtgtctgtgtgtctgtgcatatgtagtgtgtctgcgtgtctgtacctgtgtgtatgtctgtgtacatgtgtctgcgtgtatgtgtgtgtctctgtgtatgtgtctgtgcatgtgttgtatgtgtgtctatgttgtgtctgtatctgtgtgtgtgttgtgtggtatctgtgtgtgtgggtctgtgcatgtgtctgtgtgttgtgtgtgtctctgtgtctgtgtatgcatgtgtctctgtgtgtgttgtctatgtgcatttgtctgcgtgtgtctctgtgtatgtgcctatgttgtgtagtgtttgtatgtttatggctgtgtgtgttgtgtgtgtctatgcatgtctgtgtgtgttgtgtgtgtctctgtgtctgtgtgcctgtgtgtcttgtgtgtgcatgttgtgtagtatatgtgtgtgtctctgtgtctgtgcatgtgtctgtgtgtgttgtgtgtgtgcatttgtctgtgtgtttctgtgtgcatgtgttgtgtagtgtgtgtgttgtgtgtgtctgtgtgttgtgcgtgtctgtgtatgtgtctatgtgatgtgtgtggtgtgtgtgtctgcgtctctgtgtctgtgcctgtacatgggtctgtgtgtgtgttgtgtgtgtgcatttgtgtgtctctatgtgtgcatgtgttgtgtagtgtgtgtgtcttttgtatgtctgtgtctgtatgtcagtgtgtgtctgtgtgtgtctgtgtatgtctgtgggtgtctctgtgtctgtgtgtcagtgtgtgtctgtgtgtgtctctgtgtcagtgtgtgtctctgtgtctgtgtgtgtctgtatatgtctgtgtgtgtgtctctgtgtctgtgtgtcactgtgtgtctttgtgtgtgtctctgtgtctatgtgtgtctgtgtatgtctgtgtgtctgtgtgtctctgtgtcagtgtgtgtctgtgtctctgtgtctgtgtgtctctgtgtcagtgtgtgtctgtgtgtgtccctgtgtctgtgtgtgtctgtgtgtgtgtgtctctgtgtgtcagtgtgtgtgtctgtgtctgttgtgtctttgtgtctgtgtgtgtctgtgtatgtctgtgtgtgtgtctctgtgtctgtgtgtcagtgtgtgtctgtgtgtgtgtctctgtgtctatgtgtctgtgtgtcaatgtgtgtctgtgtctatgtgtgtctgtgtgtcaatgtgtgtctgtgtctatgtgtgtctgtgtgtcaatgtgtgtctgtgtgtgtctctgtcagtgtgtgtctgtgtgtgtctctgtgtctgtgtgtcagtgtgtgtctgtgtgtgtctctgtgtctatgtgtgtctgtgtgtcaatgggtgtctgtgtgtgtctatgtcagtgtgtgtctgtgtgtgtctctgtgtctgtgtgtgtgtctctgtgtctgtgtcagtgtgtgtctgtgtgtgtctctgtgtctatgtgtgtctctgtgtcagtgtgtgtctgtgtgtgtgtctctatgtcagtgtgtgtctgtgtgtgtttgtgtgtgtctgtgtgtgtctctgtgtgtgtgtgtgtgtgtatgtctgtgtgtgtgtgtctctacatctttgcgtatacaggggcatagcatagtcatgcaaaaccgtcttccttcaactcatagttctctccttcctcaaccagaagccactctgctttgttgtgaaaacaaataaactactttcttacaaaagaaagaccaaataacctgaaaagctcaaataaaatccaccttatgatacaatattaagaaacagaaattttcaatggagaaaatcccacaccagactgaggaagacagatcagtttaactggagtctctgtttgttttatatttcttttctactctccactcccatttgccaacaaaactatgctctctcacaggggacaggttcacccctcaatgtctgactaacatgcttttcatttgaattcaaaatatttggtgacgattggcaaagaatgaggatgggaaattgaatattacatcatcttatgaaagcttcctcctccctcacttccttcttcctttcttcctcctttctctccctttttccctccctcctttcctctctcccttcccttttctgttcctgctgtgaccgttcccctgattgagcagacgtggacatgggggagtcaactgtaggagtgactggcgcctcacagacaccgtcctctgaggtagctgtcaccagaggattgtcactgaaaatgcaagaagagtttggcatttgattgcattctgcacaattcaagcaggacaaattgctgcagaagatgacaccagaaatagccaccatgtagtgggttctcaccacatgacagacacggtgctgctataagcttgtgacttgcactgtctgagccctgaacacctgtagcaggtacgagcatttgctccattttcagaccaggagacagcagctcaaagaaagtgaacgatttgtcagtggtcacacagctaggaagtggcagggggcgcttagccgggttggactctgaaggtcatgcagcatctttacacagacccaaacccttcaaatcgatttccacccatgtgtgtttggcagccacatgtcaacaagccataactttcttacctatttcgggaaaacattattttctctcacctgtatttatcgtcatcctatttctgttgcaagaaatcaaaacgtgaagaagatagatttgaagaagacctttttttggctacttctgatgatgagatgcagttaggaagatggagttcagatgctaaaatattggaatttctgattgatgcatattcatggttagagggaaagtaagttgcactgtggagttaagaaatctgagaaatacaggaaatccaagctgagaaaaactcataactatgatgtttccatgtgcaggaaacttcaggtccttctgcgcccaaccttcctggaaagcttttatttaaaaaagtttttaaaatttttatttagttatttttaattgacaaacaaaaattgtatataaaggcttttgtattttatcccgtatgataaagggccgcacggttctttcttgatgcctgagttaagtgagcatattaacagcatgcagcgttcagctctcattaattttcaataggctcatttacctttgacccttttatttcaaagccaaaaaaaagaccatacatagagagaaacgattgcattatagctcctccttcaatatgagtcgctcaatctctaatggtttctttccatcgagaagaaggttttagtaaccaagtgactaagttacctagctaaactcccccctccttctttatcaatacttaattagtattgatgcttttcttggctaaatctcatttcagagcctgcacaactgaactttttccataaatgaaccttttaaaatgtgtatttgaaatatctttcagcctaagaaaatagtttttaacaagttatgcattgatttcctcttactctgaaatatttctcaagtgatttttcctgaaagattctttgtggttcattgaacacaaaaaacaaaccgtgtaccaggtctggtagaggttacagggatacagataacttggcatttgttcccaaggagcttaggtctccaagaggaaataagacacttcgacaaatagccacaaggtaaaatagagaattgtccagtgctgtaatttaactgctgattccgctgtacctaaaagctggttaaattatagttttattgaatgctaacaaactcttattcccctcctgcatggaattttaaaaaccttttattttctctgggctataattatggtgaccacattttccatggcaaaaattaagacacgtcgtctgacaaaggattcttgtgccacttctaggtgtgagaccacccatacttagattttttttaaagcaggcttttttaggcaggccctataaaaatagaggtttgttaaataggtgtgtttttagacttttcattaaaagcctacaatacaaacagtattttattttgtatctgaatcaacatgttatatcctaaagcactattttacagcctaagggtgtgtgttagtctattcataaaaacatactgctgcatagagcaataatacctgccattatctaggtgtaataaaaaggtcccaagtggtcctctccaggtctttaattttccttttgaagataaagctccttctttcactttcatggttcaagatttttggaccttgcaagtgattgctattgaagtgtgccagatgtgagcagttgtgagcatagtactttaaaagaaggtgaaggagtgactttttcttccttattgtctcccctactaccatctgtagtttctacacatgtaacttttccaaaacagcaaggcatgggaagggataccagccagggccgccacagtccaggcatgggacttctgaagtgaggagatagagatgaaagcggcctgtattgataaatgacagatgatgaaaccaaggcctgctggaccaagattcaatgacttacccaaagctacacagcttgttggtggcagagttagctcccaatccccagctttgtgagcaagggaggtttccatccccactatgatgttttcttggtgttctggggtcactctggtcgatttccatccactgtgatgttgggtatgccccctccatgtgactacataattctagaatcataattctaaaatgatatatcactgcactatcatgggaaaataagctggaagagctggagaggcgatgcctgccaccactggctcttctatagaggtgaccttgcaggttaccaggacttccccaggccgactctcagatcctgaagctgagtccaaggcaagccttatacgccatggttcctgctctcctgggtatcactgacctactgctgatccaggaacccttgggatcagacttttcccattaatgctttgtttatggttaaaatatcacagagtttagtgggaccactgctgtctttattagatggtttttatacttaattattttgtaacatggctgcacttgtaagttatctgctgatttttttgtagttcataagcataatgattgggtattcatagtcatatgtgagatgtgccaacctcaatctctatgctacagtatagagtatactataataatcactatattattacagcctggccaacatggtgaaatcccgtctctactaaaaatacaaaaattagctgggcgtggtagcgcacgcctgtaatcccagctactagggagactgaggcaggagaattgcttgaatcctgtggggcagaggttgcagtgagccgagatcatgccactgcactccagcctggacaatagagtgagactccatctcaaaaaaaaaaaaagaaaaaagtttaaaaatgtatctcttccattaaaaacatatccaataattctgctaagatatttgactgaccttcacattcagcctcattccagtgtaacttcccattcattcatttcattcaatggctatttattgagcacctactatctggcagacacttttctgcttcagcatcaaacaaatagacaaaaattccagcctgtttgtggtttatatgggattggatggtgctaataactgtatcgaaaaataaaaactattagcttgccaaaaatttggattactgtgggagcagagagctaaaggaaaagggaactcatatgtattgaatatcagtgactatgtcatatgctgtgttgtgtggtttatctcatttaatcatcacagcagccctgtgaaagatgaatatgattatttttattttttacagatgaagaaccaagatttaggaatataatatatcttgcttaaggtcatactagtgaggaaataaatctacatcagtcttttcaataccatgctagatgtgatgatatcattttagaaccatatgtttgatatatggaccaccatactgaaacctcagggcacatttttgtccactaataatatatatcaaggaatgtcatttcacagatgcatggatacggaaaatgtgtgtgtgtgtgtatatatatgtatgtgtatatatatgtgtgtgtgtatttgtatgtgtgtgtgtgtatacacacacacacacacacacacacacacatacatactactccgccttaagaatattttcatatgcaactacatggatgattcttgaggacatcatgctcagtgaaataaaccagtcacagaaggacaaatactgcatgattccacttatatgagcatctacagtagccaaattcacagaagccgagaacacagtggtggttgtcagggcctaggggaagagagaaatggggagttgcccttcaacaggaataaagaataagcaaatctcatgttaagagttcttaacacacacactcacacacagacacacacaaatgtcactttaatggacatgtttaaaacatcatttgaaatgtagttgttaagttcatgttctccttatcatttttgtagattgatcctcatttctgaatagcagtaatcactacagtacactctcctttcataacaggcatcttccatggaataccttgccccagattagcaatttgatgaccacagtaacatgtgcttctcagataacacatgacctttcatttggctgagaactcagcggttgactttgctaaaaataggtctttaatggttgagtgtgacatttcatcacggggtgttatttgggagtttttctcttcatacatgaaacaagtatggctgtagaattgattacccttgtttccttgatgaaacgcattcagaatttcaaagatattgaaaatatttttggccaaaattagttacacagaagtatggaatctgtcagtgcttggggacaaaacccttctgtgtattgaaaatgcagaagtagacagggaagcatttctggggaggagtgagaagctgtattaagtctggatgctggggcaggggtgaaggaggaggtcttgatgatgtaggtcttgaccaggttggagctgatgcaatggcaagtgctgtggccgtggtatcccctggtgatgtcattccaaggagccagctgccatcagtgctttcaagagtctggctctttgggtgaggggcaccaagggatagacgtgcacctcaggacacctgccatcttgttggccatctctctagtttggggtctttgtggaaaagatgtatgggccatgctttttagcttgtcttatcaccccaaatacttcccgtcatcctagaataatatccaggctctcgatctgatttccaaaatcttacactgccttcgcactgattctcaagcctcagctctcaccaactgcacactcccccattgcttgtgggccactcgaactgacttcctgatcctccaaacacatcaggttgctccctccttgggatcttccactacttgtgacttctgcctacattgtactgcccctaactttcccagggctggctccttcttgcctttcaaatctcagcttaaatgtcacttcctttgagaggctcccctggaacacccaatcattccctctcctatcaccctactttaattctctgaatatttctatacagtcaatgctgtgcttgtttattctttgagatccatgaaagcagggaccatgcctgtcatagtcccgacagtgctcccaagccctaggtgagcaccctgcacatagtagttcaatgagtagtttgtcaaatgaaggaaggaggcactcaggctgtagatgatttaaatgtaacaaacgtatttgtaggttattttttaataatgcaaaagaaatgaagactaggccaattttcttttttaatttcatatttcagcctcaacgcttagttatttctgattggtcagagattaattaatcacatgcaacagtctgtcctgagggggttcaaatgcactgctttttccagtgatttgcaaatgcaccggcctaaaacctactctctggcacagatttcagaatctccacttaacacatcagaaacctttagggcttatcctgaactccaaggctggcttaacttcttcagtaagcagctgcttatgcatggatgcctacaatgagtgatttcaccagaaacccacctcagctacttaaagtgtgatgtatttcatacacacaaagtgttttttcatatgagtaggttagtgacactactgaatacaaattaactgtttttgaatatactggaatctcacaaagttttttctgcctcagaagtggaattcagttgaagatgggtctgtccttagaagaccaagttattatagttgctaaaataaaaataaataaaataaagacttcaaaaaacaacagatgctggcaaggctgtggagaaataggaatgcttttacactgttggtgggaatgtaaattagttgaaccattgtggaagatagtatagcgattcctcaaggatctagaaccagaaataccatttgagccatcaatcccattactgggtatatacccaaaggaatataaatcattctgttataaagatacatgcacatgtatgtttattgcagtactattcacaatcgcaaagacatggagccaacccaaatgcccctcaatgatagactggataaagaaaatgtggtacatgtacatcatggaatactatgcagccataaaaaggaataagatcatgtcctttgcagggacatagatgaagctggaagccatcatcctcagcaaactaacacaggaacagaaaaccaaacactgcatgttctcacttataaatgggagctgaacaatgagaacacatggacacagggaggggaacaacacactggagcctgttgagggtgggcgaggagagggagagcatcaggacaaatagctaatgcatgtggggcttaatacctaggtgatggttgataggtgcagcaaaccaccatggcacacgtttacctatgtcacaagcctgtacatggtgcacatgtatcccagaacttaaagtaaaattttaaaaaataaataaagtaaaataagactttcacttactggggcaggcccatggtttctagggttgagaacaatctccaggggcttgaccctcaggaagggagaatcccttcttcccttgcagggagcatgggctgggtggcagttgtgtccctgccatctgaaagtgaaaagtggactttaaatgttgacttatatctcacaatactattggtgtccagcttctgatacttcatgggacattcctttgtacttgggatctaaccttattaatttagagagaagatgtagattaagtttcaaaaacctgaccttagaaaagatgttttaaataaagaatgggctatcatttgtattcgcaaatcacagagaatgtcccgtggcatggaatcattttgtcaagctctgcattccaatccaattttttatttgctctcatctcagggtggtaattgttaatttggagattattatttagggtggattcaacagtcttacatgggattctttttagggagaatgatgggaaattaccctttttcacatttttttatcctgggagagggggcctctattctttcgctcagtgtgacagtgagagtgaagtgaagagaagatttatgatgccaagatcagggctgagtaatatggtaaatcccagtttatcttaagtgcagtaaacccccaggcagctagaagagtgacgtattctggttagttcaacattctatttaatctgggaatacccaatagaccacttttccacaacagatttttatagaattcaaatacaacaaaatatacttgacaccacaactatactgaacacatatttatctcttctaatgacttaaaagacacttaaatatctcaccaagcctcagagtcacacggagaacatcagttatctcagaaacggctgttaatagggatttctggctgatagtgggatggcctgtttttgctgattgaaagcagcacttcattggatgcggtgggtggggggtgggacaccagttctcgttttcccaggtataattcggcaatctggggggcttcctcaaaaatacgtagaacctaaaatagataatgtatgaaaagccccctagtgctgagcctaacgcagaaaaacattcagtacatacaagatgacttgactcagtttatctgtgattggtttggtttacttttgcttttttcttttaggggtgggggagctcttcctacatagttaagggaccttcaactagaggaacttgatatacctaacctaggacaagcaggaactttttgacctccagcgttgtttatggtttcagactaagcaacaacagaagataactacaaggaactatcatgaattatggctaaatgctgaatggtgaccctttaaatcagttattagtatgactggattgtaccttctgccctgggacaagcctagacagagagagttgggagaagcaagtgtaaaaaagcctaggttgtttttctttttcttttttttttttttttatatgctgttaatgggagggtaaattcttgtaaagtttttggagagcgctttgaccttaattttgaaaatgctaagtttacatagcctttgtcttggtaatttcacttctacaagttttttctacctatgtgtaaggatgtctattacagcattatgtattttaattttgcagcaaaaaaaaaaaaaaaacttggggaaaaaaagaaatgtctgtgtagggtactggctaaattggtaaactgatatgaaataaaatgctgctattaagaaaggtgatggatacatatgaactcacattttaaaatgtctgagatttattgtagagggaaaaagtggaagtctgtatggataatattattttattgatgagaaaaaaattagatacatatacaaatgcatgtatattcatagcattttctggaaggatatataatatactgttcagctaatatataatttaaggattatgagtattataaattgaaattaatattattacaaattaatacaaattaagatttgttgatgtatacatagtattatggtaaaatgagtataattaaattattcaaaagtttgctttcttacatttgttaaatattttccagtttatgttctaatttgcttattccaatctttatttctatcacctatataattaaactccaattcagtttagggtcattcataatttccaaactgattattttactgtttcttcagtagtgttgaagataatgatgatggcactagtcatcccttattgaacccctatgatgtgctaaacacttgtacttatattttctctaaacctccaaaattgtaaaagttgatgaggaagcagaggccctgccatcttaaggaacttgctaaagccatgcagccagcaagtaagtttcagagctagcactgaaactcaggtctaacgccaaagactgtactatttccatatgtcattctgcctcagatatagagctggtgaattcatttttcaggcagtgtctttgtgggtaagacagatagctgcttaaaaagagatagaaaacatgctttggattgttatggcttgctagcattttccactcaccattgttattaattattctgtgtttcccatttgtcttaactttgatcgtatacttacaaagtttatggaaactgcccaagtgcattcgattctgctgatatttccatggtctgaacgccagccctatgagcaggggccaaatggagcatgccatctgaagactgctccagctttcagagctggacctggttcaaatgggaatgccataccactgtttattttaatgagataaagagcaaagaaaaataaaaaagcaaaatctgcatttgaaaacattcaagtaacgtaatctgtattagtcgaactaattctaagcctggcctggttttgattttagagatttccacagctccacgtgtacccccagggtggccatgtagaggtaacaacaacaatactaggaagaccattccaagcctctgtctccatttcttgcttttctgacacccttcacctgttctttattcagctatttactggggcatggtctttatctgaagtttttcctggtattttcaacccattaggataagtggggtgggtgtagggggctgtgcccacaaaacagacatccaacttggttttaggaaaggctttttagaggaaatgataactacacggagtcctgaaagagaaatcatagaggtagaggtgcccacttatctaggtagagagaacggcatgtgcataagggagagataaaagggcacacagtacatctgtacagctgtgagtccccaagcatctgacctctcttgaatgaggatattgactacaggttacttagttgaccttgttaaagccttatcatatcaggattaccagggtacaaaaacattcctaaaataaatggctctgttactaaacactccccttataacaccattgttgacactgtgacttttaaaaatctctcatatctggccatacctgtctcaccttcctaaagtcacactgacagatgacacaccagggcaagatgaaaactgtagggacttgtgtagaatgaaacgataacttcctgttcttaaaagggactgttgatataatatcctttttgcaaaaacagggaaatgcttaaggttggagtttctgttttcaataatgaagatggatattcacatgaaaagaagacaaaagaaaacagaatgccccagctgtgggctaagcagttggctatttttatttgtcaggacaaaaacatcaaatgacaattctttcttcatttctctttatgaatctagtactaaagaatgctactaaatcttaagttctattaactcctgacaatgtataaacttgggtttacagtttatatacaccacagttagggatttccatatatcctccagctagtcaagaaaacctttgtttggagttctttactgactattgcatcatccaaatttattttttgcctatgaaaactgaaaaggtgaagaccaaatttggaaattcacgtgtgccaatgcagatatcaacatgaacaaaagaaaaatacatgtattggactttggaaagtaaaatcacagacctattctggttcaaggtcagccataagtggaattgtaaagaaaggccagaaaataatatatggttcatactcaagaacaagaatggtcatatcatgtacaaaatgaattgagctaaaagataaacagtaaaatgctatggtttttattgttagcagacttccactaattataaattaaaggcagtcagtaatacccatagattaaaaagctagttgaaaactgagattcctgtagtaaatattaagcgttgtgtggtacattagtcacatgtgtataataaagacaataaatccatgtaagtacagcaatgatgaaatgtgcataaagcagtttgaactccacagaagtaagcaaagtataaatagatagcatgctcaggcacagagaaaagcaagtgctattttagcacttgagctagtgataatttattgttcaggctctccagttgagtcaatgtttatatggtgctatatattaactgaaaccaaaatagtctgtgcacatcactgtcttggatagattactgagtgatcagcagaaaccatatcaaacaaccactcccctacgagtgagggatttataatatttaaaatattcatcctaaagctccaagctgttttgacagttttgtctgttcataaatattcttcaaagagaggcagtatggcatatgtaatggaaaaagatagtaaagtggttagcattccaaactcaggacccagattgcctgggttcaagtcctggctctgttacttactagctgtgttgactttgggcaagttacttaacctctctgtgcctcagtttcctccttagtaagtggggttaaggatagtacctacctcatagggttgtgaagccgaaataattaatacaaataaaacatttagaataatgcctgacacagagtgagggttactacctagactctgccacagatcagcagaatgactttagataggttacttaaccttgacctttggtttcttctttgtaagatgcaaaggataataaacatcttacagtgtgactgtgagaatcaaatgagataccatatggaaagcagctagccctgaaggaaacacttcagattttcttcttcttgtctcttctcatcctttcccttgcagggatatttgtaaggacactttttttagcatctctgtatgtcaagcactttgttcctaccccactcacctagccttgaccatactttgtgaaatcacaaatagtcagacgttagaacccaaagaattgacctgaagacctgtccttttatcacgacactgcttttccatagaaatacttccttcagaaatccttttaagattaatgccacccaattctggcctactcacttcttgatcagtgtgggctgtattttcatttgtgacactgaatatgtttgaccatttcatgtatatgttatgtcttcccaaccaaagcctgtgttctgtgagagcaagcatctctcataactccctctggttagcctttcttgcctggctttcagtctgattggatcagaattggacaggaccagaggatttagcaggtcaggagtgattatcagctgtgaagttggcagtgtcgctaaggagtggaaccaagatgcccactgcttctggggccacattgatcacattcagacatccagaccctggaaaactcagggtcgtttctgagtctacagtctacattcaagaagaagggtagaaattcaagaagtggccaagaaagactttcaacaacttactcggatgtcatcaggggaagactaagagtatggccctcaaggcgccttcaaggatggcattacttgctgaattcatcatggtcggggggcttcaacagtttacagaagccttcaaatatttcaggaagcctctgcttccatcctactctcccctgatgggctacagtctgtattacagcaggaatccttttgcaatgagttgcacttatcttcaggcaaatgccccagatggggatatgaggttttatttacagtctgcaaaatttccctaaagagattggtgcaaagcagagctctatggacttcctcctggcatgcttgaagatctgatctgttcatccctcaaaggccagatccatctcttaggggctgacacccattaaaagccaactatataggtgttcaaacaagaatgccagtgtattcatctgtaatgagaatatttcagattaatattcatgcttgcctggccagcccatgctctctctgcagggaagttttcctaggaagccagatatgctgcagaggcagcttggtgagcacagaatctgaatacaggaagttagaagagtgggtcggtgtcaagctgagcccacacgtgcattcccaaggtcttcttaggtagttggtcaaggctccttatccatggccaaggccagcgttggcctctcaaccagcagccgatgagtccctgctctgattggtagctctgtctcctgcaggtactcagttgagttgtaatcaaacacttcaggattgggaccattctgtttctttgcggggcctttttctcttctgctctgtcatgcgtctgtgccactgtggtcctggggatggtatgtttgagggcagggccccatgcaggctccttccacagcataatggagtgctgccttaagatacactcaaagaagggtggtgagagaggtgtgtggttattcttgctaacataaattgcactgtttaatgtacacaagagatgggaaaaagaagagagcaaaagaattctctccaggcaaatgtttactatggaaactgtgtgattacagatgtccatatacaattctcagacatctgtttaagccccccgcccccgccccatgcagaaggcgatggcgtgtttcctttcttctgaactccttccacacatggaatgatgccattgccagcccttgtcttcagtcgcctttttcagaattggtttacttcttgttgtctttgaattttctctcatctagaggctgctttggccctctgaggtacccacgggcacagctgagctgatggccaagcgcggaggccccatctgcagctgtctctcatgaggaacagctgtcccatgcccatggggagagcaagtcctgtgtcccaaacagctctgtgccccacctcaccctcttcgccataatagctcaacttccatgaagcctgctgtgatgtgagccacaacaccaactcctgggtgggggtggggggcattttcctctcctggagcaatagaggagcagacacctgccctcttctttctctccctcactgctagcccacagccaagagggaggtgtccagaggggtcatttcctgccctctctggtggcttgccctccatgagttgctgttaccccttctgcacgctcatctgccagctgatcttacttcgggtggaaggttttgtgtttgttttccttccccagcacttccttgtccatagcaaggggtgggtctgagccccaccatcagtgtgacatgcatctgctcatttgtgcattgacagagattcgtcagtgacctaggcatgcccagctcggtgctgagtgctccaggcagtaccgtggcttcaacagtttgcagaacccttcaagtatttcaggaagcctctgtttccatcctgctctcccctgatgggctacagtctgtcttacagcaggaatccttttgcaatgagttgctcttatcttcaggcaaataccccaggtagggacatgaggttttatttaccgtctgtaaaatttccttaaagagattagtgcaaagcagaactctatgcaaaatttttttgtcctacatgtggtatgcatgtttgtgtgtgtaataaaactgcagagttgatttgcagaatgggccaatgaagcctgttttatggtctaatttatggcaggagaatggagtttgcacagccaccccttgtttcaggctgtttaatatgcagggtggctgtggtagctgctctctcttcttcctgtcacccaccctgtggacatcccccggtctcaagggagcagcatatgtttttccacagtcccttctctgcagaggccagccaaggacgcattttgtccatcaggtgttaggatcctcgctccatgcggtcagctggtggtagctctgtgttttctcagtacagatgtggctggactggcactgggaccacctgatccttcttcacagggctctgtttcaaaccgtgggctggtggccagaccctcttcagcctgagcatgtccaggtgaatctcctgattgtgcaggctgtggctgacagctctggatagggaacagcttccaaccttggctgtccactagaatcagcctggagtatttaaaagttctggtgtccaagccacaccccaaatcaattctgccacactccctaaggataagacccagtgctctccaagtgatttcactgtgtttgcaagattgagactaactactctctgggaaaagagaaaggaggaaagaggaaggcagagcaagataaggggagaagattggaaccagggagaaggaagaaatcaagggctggccagaggtggtgaagtaaggaggtgccccccagcaggtgcctggagatccccagcaaaaggacgatgtgcctgccccatctctgaccctgcacttggacgtgaggaaccaagagaggctcagaagaggaggcagggctccttctgtggaacctgcatgcatctgcccttcccatcagacagactgcttcctagccgtggatttccagatccagagttcactggaatgtctcttagcttctgtttcttcatccacaaaacagagacgtcaaatcgtacttgcaggttgtcatgtggatttgataggatgatggtgaagttggacacatgtctgacattctgcaagggaagcttaatgatgatagaccttagaagaagtccacaactctatttcaagttaaccctccccataacttcgttctctctgctgtgctgaaaggcagtggttctgaaatgttgttttaggagagctaaaaagaaacacagaggtccgggctcactgacgggtccaggcatctgcatttttcccaagcgccctgggtgattctgacggccagtgcttgggatcctctctacaggtgaaggtcccaatcgcaaagctaagagagagagattctgtgttgctcacagagctttactgccttccagggcttgttttgcacctcctagttgctctttctaatgatttcagtgactgtcccacctcaacataggaaagaggggtatgcgaggcgtgccagggccagcagccacacaggggtaattttggctaggttccacctttcatttacaagtcaaactgagatgaactctaaaactggcatcctccaaattagtaacctgcagccaaacaaggagaaaacgctttttcatttctggtggcagaggtaaaaatgactggtctgtcttgcatgttgcacttgcttgtcctgaaagctttacatttggggcctccgtcgtgagccatgagagtgcatggtgaaacaaagcatcttctccacattaatatttgtttttaaaggcatgaaaagccccttggatcacaatgaatcaaagcgtctgtacactgacacgtttccactgggcattgtgggaatgttggtctgtgggagcccacaggacccttggtggatttactgcttattgtttttgctgtaactataataggaaaagggatgtgtctgcccataggagcagctaccgtaggagccctgagaggcccgggagctggagggctaagggaccttgatgatggagagccccatcactagtagtttgagagccccatcactagtagggggtctaggagcattggctggagaccccctatcctacaatgcagcttcagttccccctgcttctccgaggcagagttctcaccaagggcagtactcagctggctggcagcgaagcattcacgttgccgtggtcagcctgggaaagtggaaaacgccatggagattaagcctggggtgggatgggcggtctggggtggggtgggcggacagcttctgcctccaccttctctctccaggggaagcagtgctgctcagcagcccccatagagccggggaatcggagcaagccgtttgttttccgtttcacaaaggaggagaagggattcctgctgcagtttttgctgaagagcaagacttcctagcaacacccagagcttctgctttagcaaaggattttaatatctcccttccctgctcttccccatttggctagggagctggtgtctgattcagaaaagcaacttggctataggacatcagtgttcctatggctaaaacacattttccataagccgtcaggggttaataaaatatcagctaggcatgtgtagtgggtttggaagggagaagaagggaggaaaatgaaagggaagaaggaatgatgccgaaaggtaagggtttcctaatcaggtgaagcatagtgcttaattgatagattgcgtagatggccatgtgcttttgtaacttggggctctgaggtctttcatgaaagggatagctataagacattcatcacaatactgcagaagtctcattgagtgagaaaagagaaagctaaatgaatgatcaatcagagaataaggacacttacaacagcaatgaaatcgagcatctgttgagctactgtgtgctatgctgcattctaaacactataatacctggcaactcatttcatcgtcataagaactctcaccggcgagttaggtactattatcatccccaccgtaggaatgaggatgagagggcttgatcggaatctcttgacttaatcaatgtgagtgtccatccaaggaccacaggtaagattcaggctgggtaaagactgagtcctttgctgagatatgctccctcccctaggtggagttgggaaccttcgcctccttacctgccttccgcaccgcaacatagggctttctgggaaccaagcccataggattagaactcctttggtatcgttacctttcctcacctttacaaatagcaccaggagaaaacatgggaaggggctcttgtgtattatagcaggcacagacagttccaaatatttgggatgagatgagagccccaggggccctagagggactcaggatggccttttcgggggctggaatgtacggtgtgtctgagaatctggcaatgctgccaaccggagcagctttctctcagcctgtctcaaattctctccttttctgcccatgtctagagaactcagacaccttttcttttccctccactccagcagccttactgagcgcattcccaactcacaggaaatgttcaggggtgggtggaccattcattcccactctccattgcagaatctttgtgtgtgaagggcaggaaaataggttaaaacagccattgggcactcatgctgtgcttcaggaagtctgctccaagattcccaagcaggctcaagaatggaagcagagagcaagccagaaatatccttactgctttattttattattattttttaaattgcatgttggtgcttttccattaattttaattgactcaagtcccatgacttttgtgatccccaaatcctccataaactcacttcaactgactttttttttttttttttgccttgaacccctttcccttccctgcctgggaacctgccctttaaattggtcatggctgggattttaatcactcctcaaaggcgcagtgacaatttcacaacaaagcagggaggttgggggtgggaaggggagggagttttgttttctactccgattaagagagcaactgttctctgtttgtcccctggggcccactcttggcaccaggctggggagacctcaaacttggtgttgcaacatccatcagacccaagtgagtctggggctcctcaaaggtgaactgcagctgtttggataaaattctaaaatcttgtttgggagattctcagcccttgttttacaatcgttcttcctggcaaagaaaccaggaagttttactttcccaggatctcaggcaggtaattgttttcccaaactgtattttaatctgatggaaatggacattctttgctctgagaaccttcgcccacatccataaaccgtttgtatccgccttgcgcatgggaggctcgattacacagcgccccgccctcccctgagacgcgcttccatctctggttataatttagggccattttcatttctaaacaacagttacgagccttttagtctcttggcatctcggagtgctttcctgttcagcggcggaccacagccaggtggtgggtgatctcccgaggttgggaattggcaaaatcccttacgcggtgtcatttttaagcaaagcagcataaacggtgacgagctggtagtttctgccataaccaatgctttcatggcccccaggctccaactgatttatcatgaggcctcttgctcaggggacttggctcacgcctgaaacaccagaggccccgagtctgggccctgagctcacactgggactgtgagcttagggaagtggctgcaccagtccttttggaggtgtgcacgtgccctcctcatgcaggctgacctggcggggctcttatggggaggaggggggctgagttaattctccacccctgcactttctggagatgcggagagtccaccacagggaggcagatccagccctccctagtgaattaagtgactgcaaacagagtcagcttggaagcttcaggcagggtcctaccccctatctccgccccttcttcttgggggctgtttcttgacccatcattaaaaatgtaaaagccaaaacgtttcaggggaaaagtccaatttgccagaataactttgttactcatcaacaaatactgatctatcacaccttgtgctaggtgcctccacgctggagaagtagccagcccatttaaaatgtcagcaaagattccagttgtctaaacgcgccagggacaggcaaggaggataagtggtgtgaggaggatgctgggactcagctgaagttggaaagctcacagccggtattcagagaactgcaacagggtcccctgggatattagcacgcggggaacctgccccagcatcagaggccctgggtcaggcctggtttcttaggtgttctttgtgctactcctcattttgtggagaggcatccttggtagaagtgaattttgtaaaatatgcaaaggtatggctgaatagtgaactcttcccctgtcctcaggaaaagcacatttggtacctcctgtcagaggggactcagcaatccactaaagactttttttttaatttattttttacttttgaaaaatgttggcagggtgcagtgactcacccctatggaagcgggtgaattacttgagcccaagagtttgagaccagcctgatcaacatgatgaaaacccgtctctactaaaaatagaaaaattacatgggcgtgggggtgtgcacctgtggtcccagctactcgggaggctgaggtgagagaatcacctgagcccaggaagtcgaggctgcagagagctgtgattgtaccactgcactccagcccagaagatgggagtgagaccctgtctcaaaaaaaaaaaaagaaaagaagaaaaacatcaagttcttcgggaagggttgggaggtgataaagagaggctgattaatgggtacaaacatacagttagatgaaggaataagttattgtgtttaatagcacagtaagttggctatagttagcaatttattatatatttcaaaatagctggaagagaagattttaaatgttcccaacacaaagaaatgataagtgaggtgatgagtatcctaaacactctgatttgttaggtattgtatgcatgtatcaaaatatcacatgtactctataaatatgtataattactatgtatcaattgtaaaaaaaagaaagaaaagactattactgcccttgcccatttacccgctactaccacccactcactcttttattcactgacttattcactgtttgatttattcatcctttctttcactcgttcactcactcattcaatcaacaagcagtccctgaacaaatgctgactctgtgcctgacacggtctaggcaggcaaacaccctattgggagccgacaggaggagggttttggaaccctggtccccaggtgcctgaccacccacattggcctcctaggctgccctcctcaggcccactgggtctctagtgtcagaaaggactggccagaggatgagagacagaccaatttgttaggttaggtctcatcattatagaaaatattgaatagtctgccagtgattttatctcaagcattctcaaaacactcatttccatcctgccattgctccccatgctaataaaggaaaattctttcaatagaccatgccaagtcctgaccagagcgaacagaacagctcgtctagggaagcaggcaaccaaaccacgctgtgggagttcaagctgagatcattttttagatttccctttgcttgaaaattccatccacaattttcacccaccttcccatcatcccaagtcatgtatccttccatcataacaagtcacatctccagtgtgagtgcctcccatgtcacaggcagcagagaagattacagtgaaactattcagagaggtgtgagccccgtagaaagctggagatcagaggatgcccgtctctcaggctcctgatactcttaagaaggtgtctaaatagattgtctcctgagtagtcccaatagctttgctgtctgatgtggcgtggagctccagacaactttgtctccctgagagtatttttgggcacctgtgtagtgggaggaggagagagcaagggttgggaaatctgactttgaatctcctctctatcatttaccagctgattgatccaggccaccccttcacttcctgaagcctgaattttcacactttgggttccttcttaaatccattggtaaaacaggtttagcaccaatggggaccttacatgaactaacagggctggaattcacctaggttgcccagctgtgctggctgcttacagctggctgaagcctagtctgattggcctaggtgcacactatgctggttgctagatgttttgaatatgacttttggaaataatatatgtgaaagtctctaggcagtacaacagatggttagctaattcgactatagcatttggctagtaccactcccacgtctaacttaaattatgtttcataatttttttaatcaattgacaaatggaacaatctttaaatttgcctgtatcttttgagggtcaacaaagaagttattcagtgtttagggctgagccttcttttccagtattttttcatgaatgctagtgatttggttgcccaaagttccagggaatgaactttatccaagctttggagagtgactgaggaagtgcttgtggggggcttgcgaatgacgataatatttgaggaaggtggcttttgacaaaatgtggtagacttcaaacaatgtcaagacagatacccctcaacctggatttgtgggtcagtgtggcatcttaggtgaaaacggcagacatgtgtttttaggagtatgctatatagttcttaatggaattccacaaaatttagtgttttgggggagatgacagagagattgagggaagaccgtagaacttcttaatgcttttttttttttttttttttgagacaaagtctcactcttgtcccccatgctggagtgcagtggcatgatctcgactccctgcaacttccgcctcctgggttcaagcaattctcctgcctcagccccccgagtagctgggattacaggtgcctgccactacgcccggctagttttggtatttttagtagagacggggtttcaccatgttggccaggctggtctcgaactcctgacctcaggtgatacacccgcctcggcctcccaaagtgctgggattacaggcatgagccaccatgcccagcctctttatgctctttataacagaaaatgaatgtaccattttttacttgggtctcagaaaagacaagtatgagttggtgtttaacattagactaggttgtaaattgacaggagagccatccacatacatcagaaaaagaggagcagagaagaaaaaaaaaacaacaataaaagacctgagacatccattcatccacccgtccatgcgtactagaaattctgagtttcaattgtgtttctcattgagttttgggttcatagtcttggctgggtcccttagcattaagtgaaacaactgctaacctaggaagtaggtaatctttgtttatttattatctgtaaaatgaggaacaaaagagtactcatttcatagaggttttaagaattaaatgagtaaatatacatatgtgtatgtgtctatatatagtcatatatacatatagtattatagatgtgtgtgtgcatcctttgataattaaattacagctatgtatcctctctccagaaaaattcacaaacacaagaaacttagcctaatattttcagagattttccaaagccatgggcctcattccaattatccaagtgaggaaaccctttctatactgaaattcttattatgtttttctcacttaaaaggaaactgcaagtcaaatttgattatagtcagtattctacaataaatatttctttgtggttttcatccccctaagatttttaagctcagtcatgtctagaatataccaaatgataagaagtctgatacaaacaagaagtcttgtcctattagagttcatagtaatagcatttgatctataataacagaaaaaatattgcatggacatacattaatctattcctgagcttaactccagatgaggaatcagtttttatatctcatttgtacagggtggagagagatgggcttttttctttcgatttgtttttccacgtctatttagagcaaccaaaataggaaaactgctgcacaggtcttaaaattcacttcctccatccgctttccgaattctgctccaggtctgatgactataactttttatacatgtcatttatttttatttttattttagtctaaatgtctcttcaaaaacaccagggaaaaacatttttagcttcactaagaaaacaaacatgtttaaacaacccccaaaatgttcaggtagagtcggtgtttttggcttgtgtgtattttaacggtgagcctagcaaaatatatgttggaaacagaatttttcttcatcttacatgtgccagtttctttctggaataaaacaaaaaggagaattgatcacaacttctatattggagctaaacttcttgtggttgtgaaaggttatttcaagttaaacaatatgatgtcttttttcagtttttaattacgattatgtgccagtttctttctggaataaaacaaaaaggagaattgatcacaacttctatattggagctaaactttttgtggttttgaaaggttatttcaagttaaacaatatgatgtcttttttcagtttttaattactatttatagacatcctgcgtagagtcaatcaatgggaatgcaggctatggtgcaagtgaagacaaagctgacctaaaggaggaatgaatgcggagttgagatccgttggtgcatcatgacttttctgccttcatgatctcattgaatacttttacattttcaggtagagttggtcatttagatgggaattcactgtttttgttttttgttttttgtttttgagacacagtcttcctctgtcgcccaggctggagtgcagtggcacgatctcggctcactgccagctccacctcccaggttcacgccattctcctgcctcagcctcccgagtagctgggactacaggcgcccgccaccacacctggctaattttttatatttttagtagagacagggtttcaccgtgttagctaggatggtctcgatctcctgaccttgtgatccacccgcctcggcctcccaaagtgctgggattacaggcgtgaaccaccacgcccggccgggaattcactgtttaccattttgatgcctactctcagggcatgattgttgagtccccaaagactcaagtgggaaaataataatattctgatgaaaaagccagatccatctcaccagttcttcaggaccaagcagcatcagggtgtttagtgtctgcgttgttcttgctcaacagacagataagtgaggaataatactcacgagtgaggagatagtagctgtgcagcaagtgagtacgtgaatgaaaggatgtgaaaagtaattaccaggtgaagtgctctgtccatctttagaaattgttcattaggattgtgttcattcactgtgtttttaaactattaatacataagaccatgctaagctcaacatgctctgaatcatgggagtcagaatcatcctgtgccttataggtattagcccaattacaggtcagagttgaaatctaactctgatatataacaaatgtatttgatattctatctaatttgtgtatatatttatgtatgtatctatttattagagatggggtctcgctttgtcacccaggctggagtgcagtggtgtgatcatagctcactgcagcctcaaacccctggactcaagcaatccttctgcctgggcctcatgagtatgtgggactacaggcctgtgccaccactcccagataatttttttcttttaattttttgtagagacaaggtcttgctctgtcacctaggctagtctcaaacttcaaggctcaaggaatcctccagctttggcctcccaagtgctgggatcacaggcatgagctatgtgcctggccatatttattatttttatctcttacagcttgaagcatatttaccatatatggactagctttctttcaaagtttcattttacctgtggcatcatatagctgttttgtgagtgcacttaactagactctattataactagatgttatcaatcagttggttattgtcagtaacatcccttctcatttcatgattataagtgctttgcccttgcaagccttctgaatgctcctgggccaccagttgctaagcattttctttacatgttatctgagtttatcaggatctcctaacctccctcactccagcagtgaatcaggctcattcacaccgtgctagtggaattgcagggtagacacactatgagatatatcagcaggctatttaaatcctttcatttcctaaaaggttaaaaggccagatcttagaaattaaggtgttggtttttgttttttttcttaaatccattaacctggcacagggactgatacttgaaaattacactagtaaactctggccattgtcaaatgatggacacgtatcacacatggcttatgaatacttaggcaaagcatggtttttagacattttaaaagttcactttgaattcagaatagaggaaaacattataacagtaagaaaatctcataaaagctgaatttatatattttactagcattatttcaaaaataaatcgttccttttctaatctgctcaaaaaagtctatttactaagaatacctaagaaaacattggcgtctacctgattctaagtttttggaagaagacactcgattggtgtaactctctatcagtgtccagccaactgttgacagtcacccatgtgcgacctgtagcttgtgagcccagtgaccgtccatgacaagcctgattaatttcatacctgctttgcacattatcgtttgtacttgtgtttccttatgtgcaaaatagaagtacgactgaatgaaagttttaaagagtgcagatggccccatgatttgaagtcttgagcacatataaagggcagacacaaggaaaatttgcagaaggataatgaaatgggagaagaactccaaagtgggacccaatttactggtcatataccgaatgtgacttgcatctcacagtgttagtggaggactttctctgacctggggttgggtcttttccgcataaacaccaaagatggaagaaaggaagcaaaatgtaatgtagctgagctttggatggattaagtcaaggtcatataaaacagttccaagcaaaagtggggcccaggtgtccatattacgagttgctaacattgaacactgactatgcacaaggcaccattccaagctcattgctatattattgtagcccattgaaaacccaagtttctagatgctgccttgtctgcttggtgttgcttagttcaatgagttattcattcattagtatgagagctcacacttaccatgtgcccgtcactgttttaagcatgtcgtatatagtaacatattttatactcccaagaacctaatgaggtatgcactatcattagccccattttatagatgaaaaaaactgaggcacagaggcatttagcagcttgcgcaaggtcatgcagtggtaagtgactgagccaggtttaaagccatgtgtgtgctgttagtcaccaagttaggcttccttccacatactgatcactgattacggtcataatatggctattgatgacatgagtttgcttgttacagttgcaaggaaaacattgaaaaatgtgtaaaagaacattaaaggatcatctctattcttctcaagagataagaattttaaatagcattagaattactttgatgacggccaccggcatctaccccttaaagaaaacgcgctgggcacggtggctcacacctgtaatcccagcactttgggaggccgaggcgggtggatcatgaggtcaagagatcaagaccagcctggccaacatggtgaaacccccttctctactaaaaatacaaaaattagctgggcatggtgtcacacacactgtagtcccagctactcgggtgactagagcaggagaattgcttgaacccaggaggtggaggttgcagtgagccaagatcatgccactgcactccagcctgggtgacagagcgagactccattgaaaaggaaggaagaaaaaaaagagaagagaagagaaaagaaagagaggagggagggagggagggagggagacagggagggagagagagggagaaaggaaagaaagaaaaagaaagagagagagagagagagaaagaaaaagaaagaaagaaaaagaaagaaagaaagaaagagaaagaaagaaagaaagaaagaaagaaagaaaggaaggaaaggaaagaaggaaggaaggaagaaagaaagaaagaaagaaagaaagaaagaaagaaagaaagaaagaaagaaagaaagaaaaacacgaaggggaaaaactattctgtctgcatttaacttagaaaacaagggcctgttgtttctgaccgcccaaaagaagccctccatggaatcgattaggaaataagtgtcaccagggatgatcaggtgcctgcctgtgcctgtagtgctgggaagcccatgttagattctcagaatcaaggctggagatacttcaggagagtcagccagaggctgggaattttgcctgtttattcaatgctgttaggccaataagcagctttcatcaaatacagttaagaccccaagataaagacagatgaccgctgagcgtgttcaatcctgaggacttgggttgttgctagttagttgttgagaatggctccccactttggattccaatagggaaagtgcaatgtttctagatcccaccctcaggtcaccttttctcttcctacaacatgcagaccgcctaaaaagccctggcattccaggaggactttatacttcacagaagatgagggaatctttggaaatttaggcgacagaggccagacataccaataaacggagcagtccacatttccccccagttggaaacagatcagaagctttaggcattggaaaatgctagccacatagcattctgagtttgagcatctcgtggatgtctggctgtggacgtcagctatggatgacgataagcctcctgtgactctccatgcagagtcatcagtccgtgttagaactgcagccagcaaagaatgacctcagagactatggatgtgcatcctccagggcctcagtccccacctcaacatttggcctgggcgatcagttccagtgttgacaggtggcagctgctggtggtccaaggggacttaggacatttttaattgttttgtagacatggaggtcttgctatgttgcccaggctggtctcaagctcatgggctcaagtgatcctcctgcccatgagccatcacacctgaccccagtcctgtttttaaatgtgcccagggaaggaattctaaacctcctttgtcagacttcactttggcaaaatgatccttggtacattggcaatggatggaacaaggaggcatgggcactcttgacacattctccaataggcccctctgcctttaggcagaaccacctgcccattccagccagatggcaacaatcatgttgttgttgttgtttagagaaagggccccactctcttgtccagcctggagtgcagtggcatgatcataggtcactgcagccacaaactcccgggctcaagtgatcctcctgcctcagtcctgctaattcctttatttatttttttttttttttgagacggagtctcactctgtcacccaggctggagtgcagtggtgtgatctctgctcactgcaacctctgcctcccgggtttaaatgattctcctacctcagcctcctgagtaggtgggaccacaggcatgcaccatcacacccagctaatttttgtatttttagtagagacagggtttcaccatgttggccaggatagtcttgatctcttgaccttatgatccacccgccttggcctccccatatgctgggattacagacaggagccaccacgcccagccaacatccggctaattcttaattttttttgtagagatggaggtcttgctatgttgcccaggctggtttcaaactcttaggctcaagtgatcctcctgcctcggcctcccaaagcactaggatgatagtcatgagccatcacacctggccccagtcctattttatttttaaatgtgcccaaagaaggaattctaaatctcctttgtcagccttcactttagcaaaatgatccttggtagctaggcttttcctatagcaagaagagaaatctgacttagagagaaaagttatgtatttaaaatgtcctagaaggctagatggatggatgatggatgttggatggagagaaagagaaaaagaagtagataaatgaatagatgatattcatgatagatgaatagatagatgaaagagaaagggaggtagatagatgaatgaaggaaggcgagaaagacaggaaataggtgactgtaagagacagccaaccccctagcaatgagacatatttattatagaattatacaccaaaggaggcctcttaaaacccattcaaaacagaagccaccttccttcgtgctcccatcacctttcccacatccctctactccagcaccttctcatgttgcaacattagaatttgttagctgttggtctccctggctggagcatgcgaccataaagcagggattacatctcattctgccgtgtagtctcagcatctagcccagtgcctagcacctggtcagtgctccatggaaggaaagacaaaaggaaagaaggaggggagggaagtacatcagtcaaccaatatgataaagaaacctgtataagacgatagtgtcccttgtcaggaatgcatcatttctaatgctgcaatcattaatgttttactaaccaaacttaacctatgtgatacctcatatcccgtcggtaagctgtcatactccaagtcaatacagtgatagcatctgcccagtgttggaggggtgtgttaatgctcactcctgtttaacactgttctaagggacaccagttcattattatactgtttgtctcctaaataatttccaaaaaatgtatttcaccagggttccctgttaatatgtatacgttttccatgatctgatcatgatatcgtatgggcttggccagtgagagctggcgcagtcaactgcagggtgtcctcccagccagtgacagtgtggcttctgcaggtacctcgttccccagtcaggatatgcgtgctgtccagggtccagggacgccgtccctgccccgtccagggtcctggagctggcttgactcctcgccttacatcccccagtccaaatcctctcgtcttccaaggcccattccaaggttggccaagtttctcctcctccacagcggatccttctccccactctgggagctgccttgtctttctccttagcacttcctggtgtcacatttcttcctgccaaccacctctctctggggcatgggactgggcagtctataaagccgtgagtgccccccaagcccacagtccccctccgaggaagccagccagcagctggtcctcatactgagggccaggctttgtgtcctgtgggtctgcaaccctggccataaccagtattggatgaaggacccttgtttaacaaaatgacagtggacttgcttcaaggcagacggcacagctttaaagcgatccagcaaacgaactctgcccatttggggcatgtgatttttgacaatgactgtctggctcaattagacccaacctgggagtgaactctgttttcaacattgtcatatagcttgtttgttattcggacatcccctcgggcttagattccacccccctcccctgcaagccttctctagatcctaaggtccttgaggacagagtcttgctcaatctctttttgtctcccgccagtgtctgggccctttgcatccctttgtaaatgtttgttgcacaggtgactgtaaaacacctaggcccgaggccttcacccccaaggagtcagtttctccacggctccttttccggttgtgtagccatttagcctgagagaggtttgggataggagaggtctctccaggattcctgatgagtgtggatgagcctgctgagcagggtatggaagcagaagcagccattggccagggatgtggttggagggataaacacagaagatgcctgcggctccccaagccagggaggtctgcagctaggggcctggaagatggagacaaggcagtcagagaacaatgaagacagagccagagccatgaaaagtgacagcagcaaacccagagagagggacagagaccaacagagtcacacccaatgaggttcatccaaaccaagacacttccctccatggttgtcagccctgagctcctgtttcctcccttgggttgtaaattcctcctgagcagtggttgtgtttattcatcttggtatccttagagccttgcagggcaccacatgggggctggcacatggtaggcgcccaataataattttgaacctgaattgaattaataaaaatattcttctatttttatttatttatttatttattattatactttaagttttagggtacatgtgcacaatgtgcaggttagttacatatgtatacatgtgccatgctggtgcgctgcaccaactaactcgtcatctagcattcacattttcttaatccagtctatcattgttggacatttgggttggttccaagtctttgctattgtgaaaaatattcttctattaattgacttgaggatttcacagtctctcttgaaaatctatctacagggctaccaaggtttccattaccttgaacgctgacgttcacgccttaaatctaactgtgctttcttgccatggcttaagttcatttctcctccagtggtttcaaatgcatggaatgatttttcagccattcaggaagaaggaatgctgtgtataaagcctggattcaataaagccagatttttgaaaaacagctctttagcatcttctactacagacactggtctgggcagggctttttattttattgaatccagctgaagagcttgactacattaataatgggcttcatttccaaccactgcctcccagtctttccccctaaaagcctcatggtacttaagcaactgctaatacaggaataattgtcagtggcatcacttcctgccgtgatttgaccaccaggatgaggttttcttcttgtacctaatctggagttctcaggcataccatgtctggggctgccagatcatatttaaaatttgtaagcaaatctaatggcagctgtgatttgagttgtattgagtttatgttgagaaagtaggatttgggaagattctcttgggtatgtagtaatatttttctggagcaagcctacctaaagattgcccagaggttcaaatctcttatttctacagagcatggaagggtggtaccatatcacagggtcctgagggcggactggaagattttactccattcatttcaaagaaaactctatttgttcagctcccataccaccaccatacttctttctgaagcttccctggaagatgacatctcaccatcagttttctttacactggacttgactcatgatggatttagtacacataactgtaacatggtatccatacagaagataagctcctctttgcttcaatgaaaaaggccatataaaagcacacacctattaacaggaatatagcacagccactaagagcacagactctgaagagtctgattgccagattgccagagtttgagtctagcttagccactatgtgactttggacaacttccctccaatactttgatctcctcatgtgtgaagtggggaatataatagtgcctactttttaaagtcactatgaagtttaagatgaatggatatttgttaagtgcttagatcagtgcttgtacacagtgctatataaatgactattgttgtgtgttttttttcattttactgaatatccaatacattattcctctccacataacttcctactaggataaaaagtaaagtttctctttcaggcaacatgcaatcaaatttaacagctggccaaaagtttagtaagaccttgcttattacacctttttggcaatattaaaataatatttgtttcaatctaaaggttgcttcatctgctgttatagggctaggcactgtggggccaataggagtgaaatatgtgatacccctcccaaaagaacttgcaatcaaacaatattggaaaatataagaagtgatatattaggtagcaaaacaaaactgaagagcagatgtgatgaactattggagaagtttaggagatgtagacattagtgacagcttgaatggtcaggtgaggaaggtaaggagattttcaggtgggatgagctgagctggaagaatgggttaagatttgggtgatgaaggtaagagtgctcccagaaggtaaagatacagacagtggtaaggaagggtggccagccatggtgactcacacctgtaatcccagcactttgggaggccgaggtggaccaatgacttgaaccgaggagttcaagaccaaccttggcaacatagccagaccccatctctacaaaaactagccagacatagtggcacatgcctatagtcccagctactcaggaggttgaggcaagaggatcacttgatcctgggaattcaaggctgcagtgagctataattgcgactgcactccagcctgagtgacagagcaaaagtttctcaatttaaaggaaggaaggagggaaggaaggagggatggaaagaaggaaggaaggagggaaggaaagaaggaaggagggcagagtttgggggtttgggagggtgaaggcatggaaatgaaggctctggtgtcttccttggaggagcagtgaggatgctgccctagtggtagccaaggattaattgtgccaagagcatagatggtgctagaaaatcaggcgacagtagctggattatgaaggtcttcacaaagcaggcaaatgagttcagatttggtttaatagaaaataggaagtgagaaagaggtaagaaacacgatctagaatgctggccagctgtgtcacccgcgtgcctgcctgcaccagtagtgtccccgagctgggcctgacaccattctttggtgatggtggaataaaggcaagttgaagaaataaaaacatgttcatatatgtgagttcccaagacaaaccacagcagatcccaggaatgtgtttctgattgagcaatgaagacgtgttggtggggttttggttggggtgggtgtgggtgtcatctctgtttcatgaggtctaaatttctactggctcagaaaaagaactttgagcagttttttgtttatatgggtcatcatcgtcttcaatttttgtggagttttctcagagcttcttgatggtctgctaatactaaaataaatatattaggccttttgcctgtctcttcttttctgtcactgggtgatggcctttgtttcctctaatggacacattccagatttgagtgcggagcgggcagtccctggctgctcatgtctgacatcgttccctccctgtgtagcaaagggaaatcaacagcacgtgggagggggaatctgtgttctaagaactgctttggtttacacatctatagataacactcaaccagcactgcaggtcacatggaccggctggtgaggctgaggatgagtcacttttaaattactcatagagaaagaaatatgtttctgaaagccagagtggttggcttacacatggaggtaagagagaaagcaggcagcttcataaagcactcagacctcctgtgacagctgacgtggtgtgtagtgcgtcaggtgggaagacggggccctgcgtcctcagcaatgtatttggaggtgaggctttttgttgatgggaacccctgtgctgggacttgggggtatttaggatacatttccatctagctagactttctcttacagtcccactttgtaaatggccctaggacccttgattaactttcagtaacacagtctagtggtgaacaccaagccatctgaggctgaaatatggagaagtatgtcagtccaacagaaggtcagatggggaggggcgagggagctttcagaaagtcttggagtacaagggcctcagctgagcctcgaaggtcttcattcgttgcaaagaagaaggaattctgtcccaagcgagatggaaagatcatctgagcaaaaagaaagcatcagtgacagaggctgcaacttcatttcactggctgagtctaaatttttttcacaggaaaaaatatacagaagacaagagaacaatcaccaaggaagcccaaggcactgcttactaaattggtccaagggggggatttcaccaaatgcaaatgaacaaagaacaatacatgtgactcaaaatatccgttatgctcttaatacttacgagagggtgtgaggcagggaggtgaccttttcaagggttgaaagctgtcaacttttcaaccacattgttttcattgctgggagattgaagacaggatcacctcagggtaccattttggaaaagtgatttaaaaaaaattaaaaactccttcctgcataatgttttgggacattttgaattgtttttgccgtgaagacatagaattcaggtgtccaggaaatactgcaaccttttatgagaaatgaatacccagaagtctagagctgcctggcactcactctggcaggtcttccacctctggtccctctccagcagaagggctagtgagcagtttaggacccctggagcaggggtacccttacccccaccccaaaggaagcgatgtggcttttttctcgcagccccgcccccatccctttgacaggtcactagaacaacagagtgcccaagtggagacagggaggaatgtgatggttggagggacctaaaaataaccatttttccctcatcctgaatgtgctaccctgggccagacattccctgaagggctcctctgaaatctgggaaacaggaaatgctaagaaaatctctaatttgcctggtcatgtgaactcctctcggtgttgaaacagaattttggaagaggggactctgcactgtggttgagccctcctaatcagagaacatttgcccctatgagaatatggtggatgtgactattcagcctcaacttccctctttctaaacatgtaaactctgatgcctaaagaacaaaaccagaaaagaaacccactcggtcttagttgcgtatctgagtgccgacagggcggctgagaggggcccacgtgcctgtcgctaaaaagcccctttggcatttcataacaggacccaatcccgcagacttgtctgtgcaggctcacgcaccatcttcaaaacctttactacctgtatttgtagtagatgattaatgattaggctttcttcccacacatttggctttgataatctccactcaaaaatattcagatgcaaataatttaaaaacaaagtggctccaagggctctttctgggaggatggaaatgctgcatatcttgataggggagtgagttaaagggatgtatgcctttgtcaatattcataaaactgtacacatgatatattcattttgttgtatgtaaatgatactgagaatgaaaactcttaagataataaagtgggttgagtttggaaaccagaaaaagtggacacgatgtaaatgaccccgctgaaaacgattcgagttggccagcagaaactaagaaatgcgtacgcgtgggcagtccccactgtgcggggaaatctttgcaaggtgagcagattcagctcagctcatagaaactccagctgattctgcacattcatctgtgtttttgtaggtgtttttggtgtctttgtgtccatttctgtttggctcatttccctactcaattggattttgacttctatttcctgaatacaacacccccgcaatacctaatatcccaggcctgtgaaaagtgaatgcctaataaatgtccactcactcactgagatggactgcttctcctgtctctgttacattctatcaaaattagccagtgcatttggccctaaatgcatttgtaaaaatggaaagtaaaaggagaaacattcatacttgtactagttttgagaaaattcccagttatctctgcttctaaaagaaatccgtttcagaacttttacttgggaaaaattgcttttgcctaacaggaaaaataaaacatagactccagacgcagtgatgttcgtgtgaaattaagaaaacagagttaatgttgatgtcttagtggaggcgaaggtacgcttcctttctctctttttcccccttttcaaggcaaatcagaagaccgggtgtggaaattcctgcaggtttgctctgtgtcggtttgcacgtttgtagatggagtttcatgctttttctcactagtcagtctttttgtcatcatctcatcttgaaactagagaggaagggaatggaagggcaaattgctaatatcagagacctctggaaattccccttttatggtacatgagtatttaagaacagttctctttcagttgtgtttttgtgattttggtgacactcagtgggcccagccctgcctctagtcagactccagtgtccttcagcagctctctagggcatgggctggaggcagtgggatggggggttaacgtgaattgcactgctttggaaaaacagcccaagagagatcctttttttaaagtagataacctgagcataaatctatactcacatgatttttaaaaattaacttatctagcatcttttataaactgataaatctctcatgaattaatgactcaccagtgcctaaatggtgggcagacaggcggcgctataaatttctcttggcattttgtgtgtcattatatatgataagttccagtaatggcctggcttcattgaaggttattttaaaggaagaagctttttatcccacatggtttcaggcaataccttattgaagatgacttagaccttggattctggggttggaacaggcttgtgtccactgcctaaacagggccagcacagcttcgtggggggcctctggaggaaggggccccaggaaggagtcaggtctttctgctcactggctgtcaggctgcctgggggtctcggagggtccagagcaactgatggctggtgtggaggagagcgtgtgacagccagtcccaaggccaggctatgagagactatgctaattagtgaagtccctggtagggccaggtcactcggccaccaggtaaaaagtaccaggttatttctgccttggcagaaggagaaggtgcatgaatattactcattaatacgcctcaaggaaccactaggttagacaacaaaataccttctgcatccactcccctattacttcctcactccccaaacatcctttcagtctgctcctccagcttgagaaaccaggagggtcttcctaccgagtggtgcctcccgagcctctggggtacagcttgtgaccctcctcaatcaaatgaatcccagggttccaggccaggtgagtatagatggacttggagcttttcttatgaaatgtcttgagctgagtttctttttcctgctacgccgaactctgtatatgtttgtttttgttctaattttggcttcagaaaaaaaaaagaagaaaagaaaagaaaaagaatgtttgggtacagtgtaaaagttttctcagatccagattggaaactccctcatcactctgaaaccggacaggtgctgagcggtatttgtttctctgtcaataaacagcacgtacttggcctagacataaactcctgcgggagcagtggtgcacatgggcctatttcagtgtttgggaaggactgaagggccctgaattaggaggaaggtctgcttctcaccccttctcttttgatcttctgatagagaccacatagtgttctcttcatggtattttgatggcatatggcgtataaacacaggtgtgacctttacacagtgcactgcgttacaattataataagtgagaggagataaagccagctggagtttaaggttaacgctgaaaacagcgaacgctaattttcactgaaaacaatgtcacagagcaaggcgtaggtgccccttttcaactgccgcgtgcatggttctatgaacagccccaggtgaagggtttccatgaaataagccacctcctggggtacagaaatacttagtgatgcatcctctgaggatcccctttgggaccaccctcctgggcggcatatcccaaatccttgtttggatgggaagggagcattaggtaacttcacttggaacaaggtaccatgattatgtctggtcctgttttccgtgctgacaggcagttcacctctccgggactcagtgtccttgattttaaaataagggactttgaccatattccttcagtttcttgccttctggttttttacacaagaggctcagcccagaagcctaaccccagatgcatacttaattcctcgggaaaacaaaatatttgtcagacccacaattaacttaattgtttatttgtgcaaaggctttcttgtttagttccaggacttgctgttgaaatttgaaaaagggtggccccagattcatgttcacatgagtagctgcggtagctactcaccagctagctcctgggagagaaaatggagaagaaagcgagggaagaaaacggagggcaaattctccaaggtttactcctccaccagagagacgcctcctgggcaagcgtttctacctggatccctggctgcccaggaaattggggaatgagggctttgggtgtggagtccccttggccattatgaagtccatggggttgcagttactgagcagagttagaggcattcctgcacccccacccccaacccacaacgtctggacttgggaggagattccttggcttctgaaagaagcttctgtttctgtttacgtaaacatcaggtggacgggggaggtggacgccagggtgggacgttcttgcagtgctcagatgagggtgagactggaggggccagtacaggtgttgggcatttgggtagcacctaacaataatctaaggcagtggttctccatggggatgactttgccttccaggggacatttggcacggcctggagacatttcgggttttcacactagacaagggtttccgctggcatgtcgtgggcagaggccagagaagctgctaaacatcctccagtgcacagggcagcccgtcctccccacaacaaagaattacctgacccagaatgtcaattgatctaagttctaaagcctactaatagtttgtaagttgaaagcactagattgacacaaacgggaaaagttatttgcagtttattttcctgagggacaatgggctgccactcccttccatgctattgctgggcaagactctatgttggctcttgctttcttctcctctttgaacacccccctcccctgccagcccgtctgatgccgtccaagcctttttttttttttttttttggcttctcagcaagcctcatgaatattaactgggacactcagggctaaaatgatctctggtcttacttgagaaatgccctcaagcaagaaaaagaacaagagtcccaagaacaccaagtgcccctcaccttggtcacaccaatggcccacactggctggggaggcggggaagggtcctgggagagggaggatgggcctctaacctccaaggagaacatgagtgagggccccaggaagggagagggtgcgacaagcactctggagaaagaaaggagagggttcaaggtgaccctgagctcggggcaagatctgcagggcctgcaattggcagagtgcctggcatctggccaagcagccctccctctctcttccccgctccaccacctgctcctggtcgctgcattgccggttcctcccagcctcttctcacctgctcgctctaacgtccgtctcagccaacagccctactcttccctcccaagccaacagggggaagcagagagcagcagaacagcctaaaggcaacaacggcagtctctttaccgcgcccaccctgcactcctgggcccctgtggcctccaccccagcagctggaccctccgagaccctccttttcccaccaagctcacccccactaagggccctccccacgcaatgcacagcacattccacgcccacccgacatcaatcacgtcctgtctcgtgactcatccgatactgttgacttgctgtacagtttctcacctttgcaaatgagatttgtcgcctcctcaagttgactgtccctggaggccaggagacgtgctgtggccctgctgtcccgagcctttctcagagtctcatgttcagctcagttctgttgattggggacaaaggacactgccatttgccacctctgcccgccctgtgccgacctccaccagacgtttggcatcatgagcccgtgtcgttctcaccccagcctttgtggttgatgttgtagcgtcctcttattcttatagatgaataagttgaggctcagagatgttagatatcttgggtaaggtgaagctgtgacgacttgagaacataactgaacgttctaggctccttaccccacacggtgttgccattccagtcccagaaggtcctgaggttcttttgagatgtgtaatgaatccatcttccttgagcataacacaatctttatggacctgtttaaatagttttaatttccatgtgtttactcattcattctgcaaacatgcacacagcttttacaaggtgccaggcactatcagaacctgggaaaaccaagatgaagaaaatgtagccagtgcccccaaggaggagagagacaggtggcagtgagttcactggtgagccttgagggggcagaataagaaaagggcatgatggggaggtgggggcttggtcaagaaaggcttcacagaggaggtggtatttgagctgagtgtggagaggtgtgcaaaaggcagagtggcatcccagcctgaggatgcatgtgagccaggatctgtagaggaacgaggctgcagctgatgctgccagtaatcacatggagttcaaggcaagcagtgggtgtggggagaggggagtctggaagcgtgggtcagggccagctcgccctgtggataacaggagccactcagggcatttggataagagagagggacgcaactgctttgtgggtctagcagacaccctgggaatactccagagggaagctgaatggggcaagatgagggaagatcggttgggagcttcttgccactgtctaggtaagccatgcagtggggtgaacagaagtggcttctgtaagaccagaaagaggagacatcctaagagacttctgtaaggtggagatgacagtgatggtgtgtccataggaaaagaagagggaggagttgaggatcaccccggtttttctgctaggatataggctgagggctgtcaagggggctgattagacccttagaggcagattttgggaaggtgtaatcagttccctttgtgctgtgttgggtttgatgtacctgatggatatgcagatctgtttggtcgcaaactagggtttgaggttcaaaagagattcaagagtcatgagcctaaaggcttcacaatagggttatagcttaatcctttctgtactatgaagacttcatgaatgtcccaaaatccacattcaggcctgcccttcccagagtcatcattgtcttctagaagcctagtttgtcccatttcagctgccctcctctggactcaccactggctttttggagtggccaggtctgtgtagagaattctgaatggaccattccaggtggggacctcatggcttagtacaaggtccgatgttcttgctgttgggtaggaaatcctgccttgatgagtctcaggatttggctggccgctctgccctgacgatttcaagaaatcacttctgctaactccagaactctacttccaggcccctagctgataatatacaggtattgagcttcatttgaattttttctttaagaacttaccttgactaaagatgttagaaaataagatcctaaaattaaaaattacggactctgcaaaaagagcttaactggcttcaaaagtttcacacaactcctttcatatatgcattttctgtaagctacttgtaaataaagaaggtacctaggaaaggaaaattgccatctctgacagttcaatgcaaaaatgagagaggaatgagagggagtcatgactgaattttagtgcctttgctgccaggcacttcacagaagtcatttcatcctcctgaccactcgacaactacagccttttatttttctctgttttatgaattcataaatttaggctcagggaggttaaataactcatctaacatgagttagatttaagcattgcagagaacgagaggagaactgataactcattcaactcattgacgaatctagtaatttgcagagttgaggttcaagcacagatctgtctgactctaatgtgtgtgctctttcctctccaatgctactagcatgggtgagctgtgagcattctggagagggtgaaaagtgggaggcagaggcaaaagctgagtcaaatagttttctcagatgagagagagtgggcaggcagtggatattcgtgcaagcaagttggacgccgtcagaaatctgagctgaagttatgtgggtatactcacgtcttgtagtctccgctgaaggacccattatcaaataggtggaaaatacaaaaattgaagatatggtgaagcattatcacctgatcaacccagcatcctgctctcataggtggtgtacaatttcacccagcccaagtcattatgtcttccaggagaaaaggaggctctagtaggcactgaggacaagcacatgataagctattgttttgcctcctgggaatacttggttggccctttattttttagtagcaagaagatttaggagtagcactctgtatgtatgttgattgtttggctttgtacacaaatgttagaaaattaaagaatagatttggtcattgtcatgtctgtttgccctcaccagacttgacttagatatggttctttaaagtctcaggcattttagaataactttggggaaggtatttacgaattaatttttaaaaaaactctttcattttagaattttcttaaaagagatatgtttttaaaatttcaaatacctagaattgggcaaacgaggtgttgccaagtagaggctctgctgagcaaataatgaccacatcaaaacaccagccccaaggaagcaggctccgattctgctcccagagcagcacattggtgtggtgtcaaatgcatgtttctaaagaactcaaacattgttttctcttagttagataaacaaactccttgatgtctatttatgactagttgttagtgagtctcttggaagtcatacaaagcagtgagaacaagaaggtgttttgcaggttggctttgagtaaagaccctctgttttgatcagggtcttggatgccctgctcaatcccctactcgaagttctgagggcatttctctgattgtcctccaaaactgtcctgccaactgctatagattaaataggtaaggagcagctactaagtttccttcttccctcccatgaaggagcccggccatgagatttagccaatgagcccatttaactctctgttttctagctcatttatccaagggttcagtgcaccactggaaaccttcatataacagaaagccagtgtttggggggcatttggtttcaacttgcttgtgtttgagcatttatatttataatagtgctaatctctaagggactcacatcgcattaagagctttatcttaggctgccacggaaactagcatgtaccaacatgactgagaactatgagaaattgggctgggcctacagaaaattaataagctccgattttcatttaaattatcttttccatgagattttgttttgaaacccacaaagtcgggccaagccattagcattccctatgcacacatttatcctccccctgtagcctatgctgtcccctcccctcgcccccagcccctcatctgttatcgccccccatctattatcgccccccttgcctgagtgaactcgcccttctctgaaccgtcatggccaccccttctgccaccaggacattcttgcttgtattgcttgctcctgacctcatagaaggaaaggagtagttgcatttttctcttgaatccaccccagggttttgatcatgccagtcatgttacagatgcccagtaatttctgctgggttagatgttagtcagttgcagggtagattggtgttaggggaggtagcccggccataggcaaaaaagtagcttagggtcaccgcagtcagtgtggagaagggaattttggggggaaatctggacagacgaatttgaccaatctatgaggctaattatagaaaaaaacacaagaagggggaaaatttctttcagtaattagagagatgacagagaagcagggaatgcccctgattgcattatagaagaggagatcaagatgacttcagaagtcatttgctgaaggtacaaagagagctcaaggtgaaaggagtcccattttccttcttggtggaggcgcagcttagtaacctttgaggagtgttgcctgtcttgctaggaaaaatatgacaggagtagcccagtggaggttggagacctaataccccttctcacccccaaacctgataactcattcttaagcatcaaatcttatgttatagtccaatatttctggacatttttctgccacaaggtctccagaatgtgttagcttagcttcagccttataggaattcatatttaaatcgacttcttttttcctacctggagactgctggaatatcagactaaaacagctcacgggaaggctgagcagagtctaattctagaacttgtggcatgttcatgggacacggaaaatacatagaagtgatggtttcacagagaaagggaaaagtcactccagagaaaactggagggagccaagaaaatgcggagagaaagtggggaatggcaacctcagacgcagagggaaagaaaaacaagagaagacgtacgttagcaataaaagaaaaaaaaccatcacaatgcccgttgggcaggaaagtgatttttctgcttttctttcagccctcctgggcccacagtattgaagataggagcagagtgcattcactggtgtccactcttcagctgggtgttgctgaagaagagagaaaccttagccatcttgccaccaggtcactctctttctttcgttttcaggctgacccaagcaaaataggggaaaattgcatctggacaaaggaaacttctctttctgtacctaaaagcctcatgtcaggctgggcgcggtggctcacgcctgtaatcccagcactatgggaggctgagtcaggaggatcacttgaggtcaggagtttcaggccagcctggccaacatggtgaaaccccaattctacaaaaaaactacaaaaattagccaggcatggcggtgggtgcctgtaatcccagccattcgggaagactgaggcaggagaattgcttgaacctgggaggcagaggctgcagtgagccgagatcgcaccactgcactccagcctgggtaactgacagagggagacgctgtctcaaaataaataaataaataaataaataaataaataaataaataaataaatgcctcatgtcaggagaaccctttctgtagagagccatataattaagcactgtgtttgttccaaacaaaaactagagaaagggttaaaaatcaatattattagtgacatctcctctcttcttcactgttaatcatctgccggtcactgtcataacagtgttatttttcaggcctgaaatgaaaattggcgattacatcaagcaaagagtttgaaaggaaggctgggttactgcatgattattcggactctccctgtaaatacgtgaatagttccagcttcccctcacatgggttgagggtaacagaatgacatctccctgggctagaagagaaacagagacagaacaagcgaaagtcgtctggcaccagccaacagttgcaacttatacatatagcccgggaccggtatgggtctgtggcctgttaggaacagggccgcacagcaggaggtgagcagctggcgagcatcactgcctgagctccggctcctgtcagatcagtggcgacattaggttttcctaggagtgcaaaccctattgtgaactgtgcccacaagggatctaggttgtgtgctccttatgggaaccgaatgcctgatgatctgtgttggaacagtttcatcctgaaatgatcccccaccccattcgtggaaaaattgtcctccacaaaacacgtccctggtgccaaaaaggttgtggactgctgacataaatgagcttgattcttttctcataatgtaaacgttatcaaagagacagaggtgtcagcataagcacgtcgctgctccatgcacacttatgacttcgtggctctgggcaggcccgtttagctgggagtcatagctacatttagggaggccgcgtgattgagtggaaaggcaggatattttatgtcagaattctgggtttgagttctggtttcataattgattaactaggtgtccttggaaaagttacgtattcttggtcatctctaaaagaggggtgacagcagtaataacttatctgtggcttgttgggaggaccacactagatgatctatatggaagcactttctcaacaacagcgtgccatgtgaatatttgtttttgtttgtaatagatacctctataataaggagaatgagaaggttattatttcatcctgtttgttcactgtttttatttaacaactttttttttttttcctactacattccaggcagcaggccagaggccagggaaattcgttgccacttcacagtatctcattgcatcattgagaggtttactcctgatccagcaccgaaagaccatttttggcctttaaaaataaagttgaaagtccaagagccagaaagattaaggattaagctaatttttaaaataacaaatgttttcttatattcttttctcatttatatggtgctggtaattttttaaattagattttcatctgggcattttatattaaaaatgatacagttccctgtcccttgtaattgcatttcttttgattttcttttattatgactcgcatatcactgacacttttttcctggaatgttaaaagtatacatcatctggctaaaaggaaaaaatactgacttaataaaaatggaaaagagagagagagagaaaatggatattcttctcttttggttccaaacaaggcaaagtcctcattcctcgttcttcatacatgccaaggttgatgtcacggatccaaaccagttttgagttatctgaaatgggggggagcggggaagcgcagttcaacaatcttctgaagcttgaaaaacaaatttgtcacagtctgataacccaaaaatgactgatggattttctctgcattttccaagcagggaggggtcgggcatggagaatgaaacattctgagaaaagacttaaatgtggaaacttttggttcaagagggtattctaggagatacaagaaatatctcctgggggcatccaaagggaataacactgtaatcttgagtgatgtatggttccattgcccgaggaatagggatgaaaaccataaactcctttggttggggtattaacttatcatcaaaagttaccataaataatggatattgtttatggctgagaagtaggacacatccagagaagacatcccttaatttttcataaaatcatctcagtgttattggaatatgtttttcatgccatttgagctgtcggagtatctcttgggtagattcttaagcagaaatagttgggactttacaaaccctgcctgggattctaatgtctggtgccatgaagattttggcttgtgtttcttttgatgtctagaatatcaagaacattcctagcttctatattacggcaggtcacgtcccggcttcttctagtaaaatcccctctaggattcaagcctctatttgcaccggtaataaatgtgatggcacattgcgactttgaatgcaagccagcagggctgcaggcacctgtttctcccagtgccccaactgtatcaaacccttttcatcctccctgcttttgatgcacaaacataaaacggagtcccagaatctaaaagtgatgtcacttgagtgtcaccaaggacctttagaggaccatggggcatctcttcctgttacaaatgaggctctcaaagcctggaaaggtgaatccctggaccacaagtggaggaactgagaaagggtgcgtcgacactcagaccccacagcttgccattgtgtggcttgtgatagaaccaagacatcagaacagaccagcttatccggttataaatctaggataacatgatgagcttcagagccaggggttgagctctcctgggactcctcccctccaaaggatgtgttccattgccaaacattaaaagctccgaattcttgttttctcgccaaaaggtattgtagacatgatggcagtgaaattatttttttcgcatttaaagttacccttaataaaatcactttcttcaggtggtgtaccaagttagtaaaacatacctgtttgaatctatattccatcaaccatgaacttatgcctggggatcaaaaatttcttaaaacccaccaggcgtgatcctaatacttttttcacagtttctcggggtgtttcagtaggttaggattacctccaaagacatttaaatgatgtttctggttcaaacggaaatgaaaagcacataaaattgtaagacataagaattccaagaatttggcagaggtgaaaacacacaaagaaaagatgaaatttagacgtttttattctgctcctttatccaacacaaatccctctccagttgtcccataaccacaatgccagcatttaactcctcaagggttaaaggaggcttgtagagcgggcctctggctgactccagcgtggatcgcaggcctggcgtcctgtcagacttccacggtcaaatggtaaccacactgcctctagttacctcgctccatttcttggggggctcagggacagccgccatttccccatcagtgtccacgaccagcgtccttctgccaggaggcgggctggaaggtccctcgcagctatggccaagccctggctgcggctgcagaagtctcacttgtttcactcggccaacacttaatttctttatgtatctgagggagtggggaattagtgtcttccaggaaattcaggctctgagttttctgtcctagactacaacaggcaaatggagaacgggttgtggggatcggagctgaggaatgaacttcagctgataaaatgcaagacaaggagggaacaggaaagcaaaggacaaagtgaaggagaaaaaaataaagggaattttggcagggaaaagggatttgggagataggacgggagtcctgtctgggttatagtgaaggcaggggagagaggtttgggggatcttggggacctgggccgtgtccagccattttttgtctcccaccaactcctcgctgttcagctaccccacagagcagggtcttgggcatcctgtgtgctgaggacagagctgagcttatagtcactgtgcatgaaggatgctgtgattctgcttttttgtttgttcatctttaatttggtgtattagagatgttgcactgaacacattccctctcagcatgcaactgccaaaatgctgaaagaaagtgtttggcttgttgggtctgactgcaacaatcacaaacttgccttgcaaacttctggccttccagtaacacatcgaacattaaaggattaaatgcttggtgagcagagctaggttcttgtaaaacacttggcaggtaggttcctaggaatttaaaggtatctgcctttgttaaattatgaagattttttaaatgtgagtagagaaaagctgtttccagtcatgaggagtcacgaggggtgcctccaggaggagagagaccatgcaagaagcaggtgacggggcagtggggcgagcggcccagagaagcccccccaccccctggatctcttgggcagtggggcgagtggccagggaagccccctgtatccccctgggtctcttctttgagggcttatgctctgtccgtggtgtggagccactcttgttcatgcacgttgcagacacaaccacttttggtccagcaagaatagttgagctgatcacttgaaaggatcaaaatccagttgccactgtggaagctctggggccacatattttaatattctaaattaggcctcaagttggatttgtttttgtgactcaaggaaattttgttctctttcacattctagaattccctgtgaagcagccctgtaaataggagggcttttcctgaataatatggaaagaatttctctttggggatttgagtctatatcatacaacattttaaaatactcttgagatggcacgtgcagccctagcaacagggccagaccacagtcaagggcttccagagtgtgccgcacacgttcccgtgggatccagccttgcacagtgcccagggcggcgggggcgggggtgatggggaaggtcctgtgactggtggtttctccatggtcacagggtcttctttctgttgatgtggccccattcgctctgactcacccctgacggcatacaccggcttgctttaggacccaccagggtggccccaaactcccatgccacttccttgccctgaaacaccatccttggttttcttgcttttatttgaagtcctgaggcctcagctcctgtctcactttctgtccgccttccagcccatcttaaacactcttggtacatttcttgagcgttccctgtcactcctcgggacttcctgtttagcctctcatatttattgctccgggggagccggagttggatcttgtatgtcttttctgcttcctttgggagaagcaaaatatagttgaaaaggtacatgcctggcagtcatatagtcctggattcgaaccccggctttgctgcaatgagctgagtgactttgagcaagttgtgtgacctttctgatggcagtctcttctgtctagagttgtttgtaaaagccaccttaatgggctttggcaccacagttaaatatctcttgtcatcccagatttagtgcctagccagaagtagatgctaaataaatactttttaaagtggtttgcctatggttggattgctcgattcagatatgtccaaaagatagatcaaagctagaggaaagaaagagctaaaacgagctatccaaagttagcgccaattatactatgaaaaacatgttgcctgtggatccaagattggccaaggggtttcctcagtggaaatagcaatttgcttgacctaaaatttctcttgaagccttcaccagcccaaacttgagcttattcctacgaccttaggtgtgcatatctctgagtcatcccattggaagagcgtttactgagtacctgatttgggtgatgagcatgatgtcctgccttaaggagctcattgtcatggagtcaagctcactatctcccctgcagcactctgcacaatgctgtgtgcaactcaggcggtcagtaaatgtttgcatccctgaatgcaacctgagccaactcgctccaaggtttctgcaatggcagcaaggttctgccagtgctacacatgcataggcatggccactgaccactcagctgccagtcccacctggaatattctggctctgccatttttgcctgaggaatagtcggtgtataaaggccccgtagcacagttcaaattccatttgcaatgcagccagcacatacttgcatcccttctgcaggcagggtcccccaggctcgccgctgcaagctgcaaaagtgtctgaccggtcctgagcgtttgacgggaagtgacagttgccttggaagtggatctcccaggggcacgacttttctcgtgttaagtgcccactgctgacaatgctgacaggccttgtacagtgggcacgtgtagtgttctgaccttgctcctgcccccaggaggccagcttcactggcttcactgtgagagcgtgtccttgggtcaggtcagccagctgtcaactgtgcccctgtaggttgtgctgatggaagatatttcagcccctccactcacttaaaactcatccatgattgctttcagcttctctttttctctttctctttgtctttctgggtctctgggtctcccgtttctctctctgagtttctgtttttgcttctctctctagttctatatacagcagtatccttcttgcaacagaaagcatactgtcagaggtccttcgccgtaaacagctattcagatgagaggccacgccagcgtatcttgtccatatgttaatgagccaggatccagaaccacaggctgacctggcccaccatttacctgtcctggtactaacagctgctgccactgacagagactgcattttccttgtgatagagaggtctgctgtcttccctgggcacaggaagactgtctgatgaggaaggaagaggattgtcaaagagccaagcagtgttccttgaaatgcatctggttttattcatgttgagtctttccaggtgaactgaactaaatcataaactacaaaatgaaagcagatttttcttagcatgcccatatggagctcactgaggagttcaccaccatccgtcagctccccttgtcccccagagcacagaggatgtaattgttcttctcttcctgatcggtagattgatggtgtggataagaagcctctcccatgggcttctcagaggatcatcgcagtcactttgacggtcacagaatgacccattgagctgcagaactggggagctgggatctgagtaagactattatacgttggggtgcttttgagtgggatgtaagcaggctgtgaagtttcagccatttgtgacttacctgccccaaaccaagaacaacagaaccagcaccatccggggtgcatctggtcctcgacagatgtctgggcctgcggtaggtcatcagggctccctggagctaatgcagtgtggagcttccagaaaagatgcccaggctgatttcttaaccagtcccaaaaagcaagtgccagacaaggcagggctggaggctggcagtgcccagctggctgaggatgccgcatcctccagcctagtctgctttgctctttttcttctacataccctcctccaggtctgaggccactttcagcaaattcctattaggacatgcaggttctttgtactccccacaccaccagcctcagtcaacacttactgatttaaacaagtgaaaaccaaacatttggcccctaactctggccctccacgtttaataaatgaaggactccctcccctcactgcccccagcagcgatgtcctgatgacagcgattaggccaagctgcagaacttaacaagcatctgctttcagttcccatttttggcgtattttcatgaattaactcttgcagtgacaaaaatagagggaggcagcctgggccatgccccgtgttcacgagtcacatggcaggtacaggagccacggcacgcttggcccaaatcatgaccgacaagtagagcatatttgcctgtcgccaatccctgtggagcacacagtgattatgttctactcacatacggagacaggtatggacagtggcgtggggtggggaggagagccacatgtgtggctccagatcccaagaaaaaagagttggtggatctattccaaacgccagtctgcctgtggaatccccagcccctgtcaggcagtggagagtcctgttcggtattgaatataatcagagcttcccacctgctccctactttaagccacactgatgtcaccagttctaattaaaactggcatgagaggcagagggctttgtgggcatatgggggttggggtctgggacaaataacttggattatgctcataaaagcaaagagattggaagcacagaggcacatcagaggtcacagcttcagtgctgtgccaagaaaggcctcctcctaactcacagcaggagggtctgaggccaggtggggagaagagcagtggagaagtggcggatggaagagatggaccacacagagaggaagcaggagatcctctgcaatagttacagtaacacagctctggcacgcaccaacagaacccaagtcacatcctcaaggatgcacgagaaagggtgaagaataaggtcactaactaggtaagcccagatggtagagcggagagagacttcttagaggttcgctacggcggagttttcagatgaggaaaattgaaggtcccaggggtgaagtgagctgctcaccttacaagtaggagtgccccgattgctgctcatgcatccgacccctaacttctcatccagaacacaaaccatgccacctcctactacagttcttcctttttttcttttggagaatgacagtggtgcacattttctaaccagcagcgtctcattcctcattacacttgtgagccgaggatccatcacaagccagtacttctgtggaattccatatggtataaaaatagtttagtccctcttcatgtcgtgtaaggaacataattaagctcttttattgggatatagttcacgtgccataaaattccatttaaagtgatcagcgcattggtttttagcatattcaaaaggttatacagccatcacccttagctaattccagaacttttccatcactccaaaaagaagccctgtacccattagcaatgactccctagtctccccgtctccccatctcctgggaacctctaatccactttttgtcttgatggccttgcctattttggacattgcatgtcaatggactcatagacagtgggtggcctttgtgcctggatccttcacttggcctcatgtttttgagggtcatccatgttgttgcatgtgtcaatgcttcgctcctttttttggctgagttgtaagattccattatgtgggtagaccacattttgtttatttgttcatcagttagtggatatttgggtcatttccacttttggctattatgaataatgctgatgtgaacatttgtgtacaagttttcgtgtgaacgtgcaatttcaattcctttgggtgtactaggagttgaattgctgggtcatgtggtgactctgtttaactctttgaggaatcagcaaactgttttcccacaatggctgcaccagtttacattcccaccagtcatgtgcaggggtttcaatttctcaacatccttgccaacacttgttattatctatttttaaaattagagccactctagtggatgtgatctctccttgtggtttcgatttgcatttccctaatgactaatgatagtgaagcatctcttcatgcacttactggccatttgtgtaccttcactggtaaaatgtctaccagaatcctttggccttttttaaaatttagctacttacgtttttattgttgagttataataattaagttttttgctggacatattttcatgtccaacacaatatcataaaagtgttaagtttgtcactttatgcttgatacttccccccgaaacagtgaaatagcataagcccaaaacaagagagggctgagcaccacaacaggcagggccctcggaagctctagccaaaagaaggtaatggaatgaggaaggtaggaagaaaaatgaagaaacttcgttttaaagccaaaacactggaaagcaggtgactgaggcctgtgtgtatataggccctttctttagggcctcttcaggtgtgccttaaaatgaggacaggagcatgggcctgttctctcctggcaaggccactgctgggcaaatgggcctgcagacaagacacaaagtgctttgaattcagtactaagaaaattatcaggcccatggaagccactgggaatattaccaagcagttactatagggcagggcatgtgtcttatttagctttaagctaaatactcagcaccttacaaaaatagtttggttactgaatgaataagcccgctgaagatgagatttcaaggtcatatagatacggcctttagtctctcttgttatggtttattacactaacctggtgaaccaaatagcataactattaacatatttttagcactttttgctataaatgcatttctccacctatttcagaagtacgtcttttgaattactggactgaccacaccttcttgcaggagggacatgagcccacaggtgccctgcagtatttgcatagctagtgcggcagtagggaacttggttctgtgcttccctccagacaccatcttctaccccagcccagaaggtaattagactaaggaatcctctgaggtccatctctggaatagccagctccggctgaagtctccattagcaggtggttggggccaagcttcctctgccctggcccatggcataagccatctttgcacattattttcaaactgtgaaaataatgccagagaaaggaagcacccatttgggcttctcatttttcagcctccccagctcctgagggcccctgcctgatttgcattcttagctaaatttgcataacagaacacaccagaacttccctggaccaactgtggtaagcgggcaagttttgtttttgttttgtttgggtttttcatctcctgccatgtctccagcaggtttcttgttacatccaaatgacatggagattaggtttcacgaatgtcattggcccatgtttcaaccagcccctccccctggacccagagttcctccaagatcaacccccaggcactggagatggctttggggagcagccttcgccagcctggaggaaggcaaatccttgtgcttctcacgctcccgtgcctcttcaccatctccggcccaggcagctgtgtgtccttcagttatatgctcaagggttatttttttccctttccttttcccccaaacccggaaacaatattttgggagtaaagggagggtgcgggaggaagagtcacaggggacagaagcaagcatgcagctgccaaagccacactgctctgcagacggaaccctctagactcattcagcacaatgtggctgtggaggaaatcctgccgagccgatgataaggggggaaatggagtcacttcctcaccagctgctttattcaggtagaaaaaagtcctcacttccttgcgtgtgctctgccggccaccactcccagccgccagtgcggcttgctccccctcttgctctgagccaactctggtgtcaggagaatcttgcttggcttcatggagcgctctttctgcaagacaagtgtctgtctaccccacttcctccttcatgtcctttctctttctcctggcgttctctctcacctgacggttgcatgtcatagattctgtgtggccgcagtagtcacagatagtattgccaatgagtctccagccctcttggtggaatctaggatcaggacatacccagtggtctctacgtttgcatagatgtctagaaacagcctttgacctctggtcgtctcccctgccctgcaccacaggcaccaatgctgcccctcttgccaatgccctgctattgtcctttcaccctcttaggcagcacttgtcaaagtttgtcttcctaatactccaaacatagcagcagtctccttgacagaggggttaggggccaaatgagtttggaaaatgctactccctttcttggagaatcaagcacctgtgagtgggggtgataatatttactaaccaatatagcagggacactgaccagtcagatccctctgtgtccttgggaaccggctaaccatcagtccctgggaggaggacactagaggctgctgctgaaagaaaaaaaaagcactgaattttatctaagccagtcctttatttggtctctgaatactccccttttaaaaaaatattatctattaggatgtttgaaaaatctgccatatagtaaaacaaatcagtttgtttcagctccacaaacatttgctgagttcctaacgtatgacagacacatgctccagggatccaaagataaataaaacatggtcctgcacctccaggtgctaatagttgaatggggaaggcagacatgtaaacagatgatcttcgtataatactgtgaacagggaacagccgaggattatttagctcaacctagggatttggagaaagttgcttgcagaaaatgattgagctgaatctctgaatgaaccaaagttgacttaagagtgacaagctgagcaggagaactaggttggagccagagcattgggaaccttagacttaagcatggaagcaacagatttgattctgaatggatcactctggctgcagtacacagaagagatttacaggcaaagcacaagactcagacagaggcagagagatcagactggaaatcacagcagtgatcctggggagagaaggtaaagggagagagaagtgttcaggtggtaaaattggcagtgcatctactgccctgttctgtcctgtcccctggcctttaccacttcagtgctcactaacttcacctccagctataagagatgtggcatctgtatctatttccttgattggtacttcacctgtgacatggccagctaggagtgctggggtattgacattccataggagcaaccttcaaccaatgaatagcaggagttggtgtataaataccccagctccctagtccctcagtgggttaacaagagatgcatggtctacaccggccctcagatttccctggcaggagtaagctctgtttgccggtagcaataacttgcttgatgaggtaactcatgcatgagtcttttcctttttttctctcccttccctgctccccttagagttcctagcatcatctcccaaataaaccacttgcactcaaatctttgtcttagggtctgtttctaagggagtctaacctatggccatgggatttactgttgaatgaatatggggcatgaggaagagaaaaacatctaggagactctgaggctgtaggtttacttgatgccatagccaggttgaagacaggaagagagggaggcttgatggagggagtgatgatagcttgagtttggggcaggttgatcgaactccctaggggatgtcttagaaagcaattggaataagtatttgccagttaggggagaaagtgagactggatataaagatgttaggaacattatcataggggtggtatataagaccaagagagtgaaagagattggtcaaagagagaaaagaaaatgtccagacagaagcctgatgggcagcatcgagaacttatcagaataggccagggaggaggtgcccctgagggagacagagaggaaattcttcaggaggaaggaggtagcccaaagggagcagagtcacggaagaccctcagtggtcttggtgtccggggcatcagagcacctactaagatacaacctcacacccagtgaatttagccacatggagggtattggtggtctctgtgggggtggtttcagaggcacagtataggaagaagccagactgaatgggttcaaatgtgggtgggaagtgagccaatgagtgtggcttggcagcttttctaggagggcagagacagagaagataatggttagggtggagcacgcatcagcacagacattttgaggatacctgaggtcagaaaggaaggatgcgattgaaattgtaattgagagcagggacaattgacggaggaaggttcctgaagcaatgggagatggtggaatcagggtgaagtgtggagaggagcagggaaggacaggcagaaatggacatttgtgcatgggccagggtggaaagctgtggtaattcttgcccaatgatcccagttttctcagagaagtaaaaggcagtgttcactgccaaaaggtgaggaagatgtgtgagacaagtggtggctgttgggaacagtcatcaaaaggaacagaaaagatctgacaaagaataaagaattgctaggtggtgtcagaactcactgagtttagagaccatgaatttccagcagcacctgcctgcaaggttgggtaactttcttcagcaccacttggaagcccagatgagacttgttttgggctggagtccaagttggggcagagaggaaggtcgggatgggaggaagcaagttgagggaggcagggaggaggttccctgggtagagagaagaaccagctgcttgccagcattctaaccagtgacatgcaggaggcaggtgaaacccagccttcacgctcctgtccaccacgaatttccttatgaatacacactgtaaggaatttgctttacctgtcaaagtttcactcacctcacctatttaaaaaaagagctaatatctttattagacattattaaaccaattcagggaatctgaacatactttgaggttccttccagcccagagttttctgttacagtgattctccctttccttttttcttcctaaccctaaagttgtcatgagagaagagatccccagaggtccccatggagacaaaattataaactcatgaaaaatagaaaatatcaaagtcattcgatagctgtgtttgatttcccattggcatggtctgattttctttttactttcttcttactgccgatgagactctgcagtctgcaggaacaaaatggcggcacccattgatttagtttagttcaaatgtgcacatagaggcattacctctctctagagtgtaagctctttggggacagggtggcttttctcccttagaattcccttcgattgtataacgtctgcatgcatagtcagctcaaagactgtggaatgtagctgaatttcgaatttgcttatagccagccaagccatattaaatttccccagtatatagagagctgagaacacacactgagctcggggcctgaacctcttattgcaggcattggtctgaggggcagagctcatgagagttcttctgggccagggtctaaggaggccctcacttaaccgggggcctgttgcatggttctaggtcatggctgctgcctgggagcccatgtctccccactactagacatcatctcccagcatttttgtctgtcaaattatggagtctggatttttttcagattaagtaagcacttagaatgtaacattattctatgtagtatatattgaaatatatttcataaatagtaatatacatgtttgtattgaattagaaaagacagctaaggaaaaaaatcagaatagcctcttaaatgccatgtcctcatgcctacttctgccttcaacgataatcactgttaacatctttgcgttttcctttatattatttttttctgtttgtaaacgcgcacatgtatatgttaggtttttacagaagtggaatcgtgttttgctgaccgttttgtcctgctttactcaatatgaccttaggaacacaatttcttgccaataactatagggtatgacttttaatgctgaacagcactccatcatgtggacgcgctgtcagtcatctattttcagacatttgtttccaggtttatgctattatacataatctgtgcactttattatttttccaaaataaataactggaagtgaaattactaacaaaagctttttaaaagccttttgatatgcattaccaaattcaaaaggtctccatgtttacctttacctgggcataagggttattttgggacccccgcccatatccccaaccgcatgccattcttttcagcacttagaattaaccttctcttccattcttgacaatctgaccttttttaaaaaaaattctcattttaggtttacgtgaaatttctcgaagtggaccaggggtggtggctcatgcctgtaatcccagcactttgggaggccaaggtgggaggatcacttgaggccaggagtttgaatccagcctggccaacatgaaaccctttctctactaaaaatacaaaaattagccgggcgtagtagagggtacctgtagtcccagttacacgggaggctgaggcagaagaattgcttgaacctgggagccactgcactccagcctgagtgacagtggctccatctcaaaaaaaaaaaaaaaaaaaaattcttgaaggttctgaacggaaaaggaaaatgttggaggatggctgcctcccaggtgggagtgctccatggcccggaggggtgaggacacctttgctgagtttaggagtcttgaccctggtctgttcccgtccacacctacctggcctggttccaaacctgcagcaaggctgcggctgggagtttagccatcctgtccccttgggccagccctgggtggaactcagatcctctgtggcctctgaattggaaatttatggggaagccactgtggacagagccaccagagctgaggccctgcccatctcctcctcataggaggagccggtgccagcctttccgtgtgaacctgtgatccgtgaagtcgggtaagcccttgccagtcctgacatgagcaagggacacagagcttcctaaatatatagactgggattttgtccgaatcacatgacgacccaggttttctttttccctctttgttgcttttaatacataaaatgagcatgtgtttatttaaaacagctttcaaactcaaacaaataatgacagactgttcaaacagacttcggaaatcgccccaatcaggatgtttgaaaaatcaggaagactttctacgaaagaagctttcaggtcattttagtcccgaagccgcagggtctcctttgcactttggaattgtagaagggcaaagtttagaggccagctccaacctccagggggttaaatgacttgccctctagccctacactctaataatgtgtaaagaaggacagataggtaggcattgtattatcacttcccatctttgaccagaacacgggatgtatacattttaattcataattcctatagaaattacggactatcctcagatcagaaagctaagagaggaaattgcttctgcaaaacggcaggctcagcagaacttcttgggggaagggcaggttgagtaggtgcggagcaggtctgcaagaggacagacaagagcaaggtgtttgttctgccacgagctcactttctgtatccaatttacaaatggctttgagtgacctacgttaatcttcacaataatgaattttatggctatggatgaagtaaatgaggctcggggctgggttatctgctgaaggttataaactaataaaatatcaaagccagggttcacccacactcctcctccaagtcccatgcccttctcagccccctgggatggcaacagcatctctatgctgaggctttgggccaagagctgctagtttagctcatctcactctagaaatgacattgttctacgtaatgcatatcagaaatggcctgttaggttcatgagaagcactgttatttgtgtgggggtgagggtggtgagagggaattattccagctctgaggaggtggggatatttgggacagcatttcttctgctctccagcactgtgtgccagaccaactgggagaaaatgccagctggagtatgtccctgcatcctccggtttcccaggatggcttcaggtccagacaggacaaatgatcaggggcttagtctggttcagattttgccacacaaaactctgttgattactaaagggattcagagcccggccactgaccttctcaatgtcaagccaaattgcagacaacctattgccagtgccctgacaaatttggggtgtcttttggctgggctattgggggtttcagcctacccatccctcagagagagaagcatggatgggaggactagttgacatttgcagccgtgtctgtgatgtcttgggttgctccctggaagaggcagagttctggcttgtggagaagtcctgactccttcctgccccactgatccctgcttatatggagaggggtgtgcatcttggcagacaatcatgattgtgccttagctctgtgctaagagcactaaacacacattttatgtacgtctattgcctcgcttttctaacactgaaatttagaaatgtttaacaatagatatttaaaaagaagaagaaagcccttgcgccctctcctggtaaaagttaaccaaggacctccaaagatgcagaaggcccactgggttagcagtcgctggtctgggctagctgattgtgctgatttgaccaatgctgttgacacacaggatgggtcatctgttcttctatggtctgtgattacagagcatcttataaaccagagtttctcagcctcggccctgttagcattggggggctgccctgtgcattgtgggatgttgaacagcatccgcggcctctgcccactagataccagtagcaccctcaccccaaatcatgaccactaaaaatgcttccaaacattgccaaatgtcccctgggggacaggatcactctcagtgtgaccctcgccctaaattcttgcctgccttttgtaaaaggtggcattggttggagggcaatccatgagaatgtgaggatggctcaaggcaagcccttcatgatgtctggaagcaatattgatgactggttaactgaggtcacttctaggagtttgtttcaaaaaagcaactgaacaaatagacaagaatttatatacaaaaatatatcatgatattgtttataatagcaaaagttttaaacactataaacatgaattttttaaagtatggcacattttatatatcatgaaaataattgtataaatctatatttaataatgtggaaagttaccctaacaatgctttaaatcctcatcaagactacctcaggattctcagaggctgttacatatagaaggagtaatttcaaacagattcataagcatttgggtaaagcattaagccaaagaccaatgattgtattcagaaagcttaagtgaacaaacatttactacgcacctatagtgcaccacaaccatgcccagcatgagggagacaaagagaatccctggtcccactgctacagcccttgccccagagaaagggaacccctctgtgcactgttggagcccctcccaacagcgatgtccagggtcatggtatgttactgtttcctgtaataaaactgtgtgctttgagtcagggttgttgggaataatgtgaaactattcttgttttcttcttcatcctgaataaatcagaagtaaaaagaattcatttactgatttatatattcaaatattcattcagaaagttgtccaaatactcattggacccaaatgtgaaacataatctccccaaaatctaggaaatgagcaattggtgatttgctcaatccaagcccatccagagggtagactttgctacaacacactacagacccgacttgagatggagagataggaatggaagggagacactttttgtctctcagggacctgcacatccagtgacacacccctgatctcctgccttgtgagatccacaatttgagtaaatgcagagttgtggtcgtccagtctagccacccccaagagaaaccccctgacagctccctttccccaggagaaccttgaccttagaggttggcactgcaccagtcaaggccgcccttggcccctccactgactgagcccttgactgaccaaatgctctcatagagctgccgttagccacgccagggcatcagcagagagaagggtgctggtttctatctgggttcaaagcctggctctgccacttgttaaaaagtctcttattccctgcgattctcagctttttcatcttcagaacagaaacaaataaaataacttcataagattggtacaaagaattagctggatgagaaagcgcatgcctttaatcccagaactttgggaggctgaggcaggagactcacttgagcccaggagttcaagaccagcctggaaagtatagtaagaccctatctctacaaaaaatttaaaaattagccaagcatggtaatcctaggtactcaggaggcggaggcaggaggatcactcttgagtccaacagttcgaggctgcagtgggtcatgattgcaccactgcactgcagcctgggcaacagagcaagactcttgtctctaaaaaaaaaaaaagaaagaaaaagtttggtacaaagactaaaataatgcatgtcagacatttgataagatgtcaacactcaatcgaggagtgtgacggtcatcatcattgctagattttattacttttatggatgggcatgctagctaaaattgcaaaacctctaatattttctaactgcctctgctgtttttctcctcggcccttagcactctctcctacaccatgtgataatttatattgattgctgtctatactgttccactcaatggaagcttcgtgaagtaggaacttttagtctattttatgcactgctgtatctctaagatggctggcacgtaaagagggtctcaataaatatgccttgaattaatgaaaacagtggtttctgaatcatggcctccaaagagcatttgccttttcccctctcacccttctgaaggtgcccaggctgccctggcaggatgcctctttctctgtggggtggcattctctgctctctctctaatactctttctttttcttccctcctctcccccaactgcaggatgcctttgtggaactgtacggccccagcatgcggcctctgtttgatttctcctggctgtctctgaagactctgctcagtttggccctggtgggagcttgcatcaccctgggtgcctatctgggccacaagtgaagtcaacatgcctgccccaaacaaatatgcaaaaggttcactaaagcagtagaaataatatgcattgtcagtgatgtaccatgaaacaaagctgcaggctgtttaagaaaaaataacacacatataaacatcacacacacagacagacacacacacacacaacaattaacagtcttcaggcaaaacgtcgaatcagctatttactgccaaagggaaatatcatttattttttacattattaagaaaaaaagatttatttatttaagacagtcccatcaaaactcctgtctttggaaatccgaccactaattgccaagcaccgcttcgtgtggctccacctggatgttctgtgcctgtaaacatagattcgctttccatgttgttggccggatcaccatctgaagagcagacggatggaaaaaggacctgatcattggggaagctggctttctggctgctggaggctggggagaaggtgttcattcacttgcatttctttgccctgggggctgtgatattaacagagggagggttcctgtggggggaagtccatgcctccctggcctgaagaagagactctttgcatatgactcacatgatgcatacctggtgggaggaaaagagttgggaacttcagatggacctagtacccactgagatttccacgccgaaggacagcgatgggaaaaatgcccttaaatcataggaaagtatttttttaagctaccaattgtgccgagaaaagcattttagcaatttatacaatatcatccagtaccttaagccctgattgtgtatattcatatattttggatacgcaccccccaactcccaatactggctctgtctgagtaagaaacagaatcctctggaacttgaggaagtgaacatttcggtgacttccgcatcaggaaggctagagttacccagagcatcaggccgccacaagtgcctgcttttaggagaccgaagtccgcagaacctgcctgtgtcccagcttggaggcctggtcctggaactgagccggggccctcactggcctcctccagggatgatcaacagggcagtgtggtctccgaatgtctggaagctgatggagctcagaattccactgtcaagaaagagcagtagaggggtgtggctgggcctgtcaccctggggccctccaggtaggcccgttttcacgtggagcatgggagccacgacccttcttaagacatgtatcactgtagagggaaggaacagaggccctgggcccttcctatcagaaggacatggtgaaggctgggaacgtgaggagaggcaatggccacggcccattttggctgtagcacatggcacgttggctgtgtggccttggcccacctgtgagtttaaagcaaggctttaaatgactttggagagggtcacaaatcctaaaagaagcattgaagtgaggtgtcatggattaattgacccctgtctatggaattacatgtaaaacattatcttgtcactgtagtttggttttatttgaaaacctgacaaaaaaaaagttccaggtgtggaatatgggggttatctgtacatcctggggcattaaaaaaaaaatcaatggtggggaactataaagaagtaacaaaagaagtgacatcttcagcaaataaactaggaaatttttttttcttccagtttagaatcagccttgaaacattgatggaataactctgtggcattattgcattatataccatttatctgtattaactttggaatgtactctgttcaatgtttaatgctgtggttgatatttcgaaagctgctttaaaaaaatacatgcatctcagcgtttttttgtttttaattgtatttagttatggcctatacactatttgtgagcaaaggtgatcgttttctgtttgagatttttatctcttgattcttcaaaagcattctgagaaggtgagataagccctgagtctcagctacctaagaaaaacctggatgtcactggccactgaggagctttgtttcaaccaagtcatgtgcatttccacgtcaacagaattgtttattgtgacagttatatctgttgtccctttgaccttgtttcttgaaggtttcctcgtccctgggcaattccgcatttaattcatggtattcaggattacatgcatgtttggttaaacccatgagattcattcagttaaaaatccagatggcaaatgaccagcagattcaaatctatggtggtttgacctttagagagttgctttacgtggcctgtttcaacacagacccacccagagccctcctgccctccttccgcgggggctttctcatggctgtccttcagggtcttcctgaaatgcagtggtgcttacgctccaccaagaaagcaggaaacctgtggtatgaagccagacctccccggcgggcctcagggaacagaatgatcagacctttgaatgattctaatttttaagcaaaatattattttatgaaaggtttacattgtcaaagtgatgaatatggaatatccaatcctgtgctgctatcctgccaaaatcattttaatggagtcagtttgcagtatgctccacgtggtaagatcctccaagctgctttagaagtaacaatgaagaacgtggacgtttttaatataaagcctgttttgtcttttgttgttgttcaaacgggattcacagagtatttgaaaaatgtatatatattaagaggtcacgggggctaattgctggctggctgccttttgctgtggggttttgttacctggttttaataacagtaaatgtgcccagcctcttggccccagaactgtacagtattgtggctgcacttgctctaagagtagttgatgttgcattttccttattgttaaaaacatgttagaagcaatgaatgtatataaaagcctcaactagtcatttttttctcctcttcttttttttcattatatctaattattttgcagttgggcaacagagaaccatccctattttgtattgaagagggattcacatctgcatcttaactgctctttatgaatgaaaaaacagtcctctgtatgtactcctctttacactggccagggtcagagttaaatagagtatatgcactttccaaattggggacaagggctctaaaaaaagccccaaaaggagaagaacatctgagaacctcctcggccctcccagtccctcgctgcacaaatactccgcaagagaggccagaatgacagctgacagggtctatggccatcgggtcgtctccgaagatttggcaggggcagaaaactctggcaggcttaagatttggaataaagtcacagaattaaggaagcacctcaatttagttcaaacaagacgccaacattctctccacagctcacttacctctctgtgttcagatgtggccttccatttatatgtgatctttgttttattagtaaatgcttatcatctaaagatgtagctctggcccagtgggaaaaattaggaagtgattataaatcgagaggagttataataatcaagattaaatgtaaataatcagggcaatcccaacacatgtctagctttcacctccaggatctattgagtgaacagaattgcaaatagtctctatttgtaattgaacttatcctaaaacaaatagtttataaatgtgaacttaaactctaattaattccaactgtacttttaaggcagtggctgtttttagactttcttatcacttatagttagtaatgtacacctactctatcagagaaaaacaggaaaggctcgaaatacaagccattctaaggaaattagggagtcagttgaaattctattctgatcttattctgtggtgtcttttgcagcccagacaaatgtggttacacactttttaagaaatacaattctacattgtcaagcttatgaaggttccaatcagatctttattgttattcaatttggatctttcagggattttttttttaaattattatgggacaaaggacatttgttggaggggtgggagggaggaagaatttttaaatgtaaaacattcccaagtttggatcagggagttggaagttttcagaataaccagaactaagggtatgaaggacctgtattggggtcgatgtgatgcctctgcgaagaaccttgtgtgacaaatgagaaacattttgaagtttgtggtacgacctttagattccagagacatcagcatggctcaaagtgcagctccgtttggcagtgcaatggtataaatttcaagctggatatgtctaatgggtatttaaacaataaatgtgcagttttaactaacaggatatttaatgacaaccttctggttggtagggacatctgtttctaaatgtttattatgtacaatacagaaaaaaattttataaaattaagcaatgtgaaactgaattggagagtgataatacaagtcctttagtcttacccagtgaatcattctgttccatgtctttggacaaccatgaccttggacaatcatgaaatatgcatctcactggatgcaaagaaaatcagatggagcatgaatggtactgtaccggttcatctggactgccccagaaaaataacttcaagcaaacatcctatcaacaacaaggttgttctgcataccaagctgagcacagaagatgggaacactggtggaggatggaaaggctcgctcaatcaagaaaattctgagactattaataaataagactgtagtgtagatactgagtaaatccatgcacctaaaccttttggaaaatctgccgtgggccctccagatagctcatttcattaagtttttccctccaaggtagaatttgcaagagtgacagtggattgcatttcttttggggaagctttcttttggtggttttgtttattataccttcttaagttttcaaccaaggtttgcttttgttttgagttactggggttatttttgttttaaataaaaataagtgtacaataagtgtttttgtattgaaagcttttgttatcaagattttcatacttttaccttccatggctctttttaagattgatacttttaagaggtggctgatattctgcaacactgtacacataaaaaatacggtaaggatactttacatggttaaggtaaagtaagtctccagttggccaccattagctataatggcactttgtttgtgttgttggaaaaagtcacattgccattaaactttccttgtctgtctagttaatattgtgaagaaaaataaagtacagtgtgagatactg

SEQ ID NO: 44 - DNA, 11479 bp, Homo sapiens
  misc_feature 1..11479: note = PLK1
  source 1..11479: mol_type = genomic DNA
ggaggctctgctcggatcgaggtctgcagcgcagcttcgggagcatgagtgctgcagtgactgcagggaagctggcacgggcaccggccgaccctgggaaagccggggtccccggagttgcagctcccggagctccggcggcggctccaccggcgaaagagatcccggaggtcctagtggacccacgcagccggcggcgctatgtgcggggccgctttttgggcaagggcggctttgccaagtgcttcgagatctcggacgcggacaccaaggaggtgttcgcgggcaagattgtgcctaagtctctgctgctcaagccgcaccagagggagaagatgtccatggaaatatccattcaccgcagcctcgcccaccagcacgtcgtaggattccacggctttttcgaggacaacgacttcgtgttcgtggtgttggagctctgccgccggagggtgagtgtcgctgctggggaactggaactgcctgcggggcagttggagcgcccagacctggagctgctggaaagagtacccagcaagggagagcctgggacttggagctgctagagaagggtgctgggagcctcccgcttacgtatggaaagtgtctttggtaagggcttcttggctctgggagctgctagaggagggggttccagtgaagtggagtctgagtcatgttgctgatagggaagtcagcttctggacgcgaggtgctggggggaggggtgctggtaatggacgctagggccctggagtacccagggaggagtcccaggttagtgatgccgcgccctgggagcttctggggtggagctgggtcagtgggggggtagttggagccagacttcgggccttccgggggagatacgagtcaggaaagggatctggtgctggggactcggagcttccggagtggggctgagagaggacccccaggtaaggggggaagctagtaggagaaggggtgctgcgaatggttgtggacagtgttaaggcagggtccagatgccgctgtgctggagaaggaatggggtgggggcatagggaaggagagaaacccaccaagacccctctttcatcccttgggagtccagagtccagtcctgtgcttcctttgcctggtaaccctctcccttccccaccggcctcaatccacctccccatccctcctgccctctccttcccacccacagtctctcctggagctgcacaagaggaggaaagccctgactgagcctgaggcccgatactacctacggcaaattgtgcttggctgccagtacctgcaccgaaaccgagttattcatcgagacctcaagctgggcaaccttttcctgaatgaagatctggaggtgaaaataggtgagttgctgagcctgcaggggtgcttgacatcactacaagaggctggaatttggaggaggctgggagaaaggaaggagacaacccacaagtcagtatcttgcctacagatgcattatttttttgtgccccaatgcaatattttttttttacaaagaatttgaatttgtttttattttttaaattggaaggtttgattgaacaaaaagtttgattcagaactccttttaaacaggtgaaagcttcagtaatacgaggacagcattttcttagggcagccctttgctgggctggaaaacagctgtccccttcagacttctttgccacagtctctactcctccctattcttcacagacttgccaagtcttggaggttaacttgcttgatccttgaaggcattggagttttactatccctgtcagttcctgtttcaaagcatagcccctttctaaaaggaggggtgagaagtgtcactggaggcacctccctggtgtcagcatgggaggaagattcctgggcaagccttgctacatacaaggagcagaggcttgtgggatcagatggccctggttctggatggtcaaaccttaactagccttctgcattgacagatgtcagaggctggcatctaagtaccaactcttcctccctctgtcccaggggattttggactggcaaccaaagtcgaatatgacggggagaggaagaagaccctgtgtgggactcctaattacatagctcccgaggtgctgagcaagaaagggcacagtttcgaggtggatgtgtggtccattgggtgtatcatgtaagttgggagttgtctctggaccaacctggtctcagcaggggcaactttgggacatcctacctggctgaccttttctgtggacctttcggcctgctttacagaaagcctactccaagggacaagtcatccccaaacaaagcctaattgtcatatctttccctgtcactggtgtatcctgtcggatttctgcagcctaggtcatgggtacagcggaggaggaggagggagagtctccacaaccttactgtagtcctttgctagagttgtccacagggcagcatcaccatcatctgggaacttgtatacacaatctcaggacccagactacttactggatcagaatctggatttttaacaaggtcccttggtgattcccttgcacaataaggtcttaaacaccgatgagcattagcatggtgggggaaattaggccaggagttacagatggaaagatgatgtgccagtggtctgtctggattaagaccatcagcagcggttggtggcaggcagaggcttgggccttttcaggtgttatctttcttgttttgggcctaggtactggagagttagaaatgagttgtagcaatggctttcatacgtctttgcagtggggttttttcaaatgaaaacttgaagacttaagtacagaactgctaaaggtggagctgcttctgtaagcgcaggtagccctttgacctgttttgcatgacaggcagcatctgaggcccttgcacagagtcctagatgaccacaggctatagctaaaaaatcactggcccttaagaatcctggtctcaccatgtgtattctgctgagggcttattctagccaatgtcatggcttctggggctgctcagtggacttagggattgtcttcaggggccccagagttagagtgagtgtccagaggatgcctgacctttgttctgaccctgagatgatttctctcatgtctgggttgtggctgggagactggtgccaaatcctaccttgtgcttacaggtataccttgttagtgggcaaaccaccttttgagacttcttgcctaaaagagacctacctccggatcaagaagaatgaatacagtattcccaaggtgactaatgatgctttaagtttacatttattttgttttccccagaagctgtttatggagcccagcaatatcctaggaccagaaataggtctatcccacctctaaggtagccacagagcttgagagggcctgtgtctgaaattgcatacagaacttgacatgtatgtgcacataagcattttttctagggggagagagttggcagattctcaagagattgggtaacccaaaagttgtgtaaaaagcaaaaaacaaaggaggtaggaaggagtaggaggcaaaagtgcttaatctttagaaatggtttatcttaattcaaatggattctgccacttagcgagatcacattgggcaaatggcctgcatcttttttttttttttttttatttgaggtggagttttgctcttgttgcccagtgcagtggcatgatcttgactcactgcaacctccacctcccaggttcaagcgattctcctgcctcagcctcccaagtagctgggattacaggcacccaccacctcgcctggctttttttttttttttttgtatttttagtagagacggggtttcaccatgttggccaggctggtctcgaactcctgacctcaggtgatccacccgccttggcctcccaaagtgctgggattacaggcgtgagccaccatacccagcctggcctgcatcttctgaaccatagtttccatatataaagtggagttcctgccttggagcacctcacagagtgccttgcatgtggtgagtgctctcagaattatgaatcactgtgaatcccagggcttcctaatggcatagttgtgtgcattttctttttttttttttttttttttttgagatggagtctcgctctgtcgcccaggctggaatgcagtggtacaatctcggctcactgcaagctctgcctcccaggttcatggcattctcccgcctcagcctcctgagtagctggaactacaggcaccagccaccatgcccggcttcttttttctgtatttgtggtagagacagggtttgaccgtgttagccaggatggtctcgatctcctgaccttgtgatccacctgcttcggactccctaagtgctgagattacaggcgtgagccaccgcgcccggccatggtgtgcattttcacaaccaccaacagaaatacatttaaaggaatagctggttcctgcagaagcctagcacacagccagtttgaagtgtagtgtccttgtgtgaagccaggaggcctgtcaccataaggacagacatagtaaatccatcacaaagtgtcagttcactgtcagagacagcatggaatcaagccagctagacaaggccttcaccctctctgtgcctcactttcctcctctgtgaaaaagggatgataatagatccccaccccttagatgagttggtgagggctaagtgagctaaacacaggagtgcttagaatgctttcctggcacatagtgagtgctaggaaagtgagttggtgttcggccacagtccattgacccttctgtcaatggtgctcagtaaagctgacagtggagaacttggcattgaaccaagttgtgaaccactgacctgtggtgtatttgagactgggggctgcatgtgggctggggacctgcagctcctttgaggccgtactgtactccaggtccccttcacattctgcttatggctgtccctctctctgccccagcacatcaaccccgtggccgcctccctcatccagaagatgcttcagacagatcccactgcccgcccaaccattaacgagctgcttaatgacgagttctttacttctggctatatccctgcccgtctccccatcacctgcctgaccattccaccaaggttttcgattgctcccagcagcctggaccccagcaaccggaagcccctcacagtcctcaataaaggtacaacaagggtctgggtaagagagcagaccccccagagaaagcccaggttgtaggggtgtgtgcagcttagtccctggccctgagagctcaggtgtggagtaggacaggcctctgtccttcaatccgtggttccaatgcccatctgcttctcggccctgccaggaaagactgaccttaccatggctggataaacgtaccatgcccaagaagaagaaaatggattgaatgccaagcctgaaaaattctttcaaatcactttaattaatttaattttttggagacagggtctctcctctattttccaggttggagtgcagaggcacaatcacagctcactgcagctttcaactctagggctcaattgatcctcccatctcagcctcccaagtagctgggactgtcaggcatgcaccaccatgcctggctgacttttctaatttttgtagagacagtgttttgccatgttgcccaggctggtcttggaactcctgggctcaagcgatcctttcacctccaccaaagtgttgggatgacaggcatgagctgctacatctggcctttaaaaaaatttctaacactttttcatgattcattgaaaaacataaaaatttccttttttttgtggcgtgatcccggctcactgcaagctctgcctcccgggttcacgccgttctcctgcctcagcctcctgagtagctgggactacaggcgcccaccaccatgcccggctgtttttttgtatcttttagtagagacggggtttcactgtgttagccaggatggtctcaatctcctgacctcgtgatccgcctgcctcggcctcccaaagggctgagattacaggcgtgaaccaccaggcccggccttttttttttttttttttttttttttttttttttttttttttgagacagggtctggctctgtctcctaggctggaggggagtggtatgatctcgatttcactaaggatacatagttttaaaaagtcacttgaaatactttttttctctgtggatatatcaccaatttgatgtacaacttcagttcatttttcagttttcaatttttaggtattggtttttcttaaacttcattttggaataattttaggcttatacagaaaagttgcaacaacaacaaaaaactccccagagttcctacataccttgcagcaattattacagtggaattttttttgagacaggtctcaggacttgctgtcacccaggctggaatgcagtggctcactcatagcttactgcagccccaacatcctgggctcaaacagtccccctgccttaccctccagagtagctaggactacaggcatgtgccaccatacccagctaattaaaaaatttttttctttgggaggccgaggtgggtggattgcccgagctcaggagttcgagatcagcctgggcaacatggcgaaacgctgtctctactaaaaatacaaaagactagccgggcgtggtggtgtgcacctgtaatctcagctactcgggacactgaggcacaagaatcacttgaacctggaaggcggaggttgcagtgagccgaggtctcaccactgcactccagcctgggcaacagagcgagactctgtctcaaaaaaaaaaaaaaattttttttttgtaaagacaagatctcactatgtcgaccaggcttatctcaaactcctgccctcaagtgatcctcctcggcctcccaaagtgttaggatttacaggtgtgagccactgtgccctgcctagaatgatgttctaatggtaatttttcttttcctcactttttttgcatttaataattggaattcttctgtaaggaagagctgttccttctctccgattgatttatttatttggttatgtctgaaatagactcatggatatttttattctttgggctatattttaaaggattacttatttctctgcttttatttatttttttaaatttgagacagggtcttgctctgtctcccgggctggagtgcagtggcacagtcgtacctcacagtagctttgatctcctgggctcaagtgatcctccagcctcagcctcccaagtagttgagactttaggcatgtgccaccgcgtctgaccaatttttaaatttttggtagagatgaggtcttgcccacactggtctcaaactcctgagctcaagtgatcctcctgcctcagactcctactttttttctttcagttttaattttttatatagcattttaaaaacttaaggaaattttcagttacccgaaggtggagagaactgtatgatgagtcccatgtttcatctatttttactagttatcaacatttggacagactgttttatttattccagcctcctgccttttttgttaccggtgttttaaaaaattattatttactatttattattatttatttgagacattcttgctttgttgcccaggctggagtgctgtggcaagatcatggctcactgcagcctccacctcctgcgttcaagtgactctcccacctcagcctcccaagtagctaggactacaggtgtgccaccatgtccagctagtttctgtatttttagtaaagacagggttttgccatgttgctcaggctggtctcaaactcctgagctcaaacaatctacctgcctcggtctctcatagtgttgggattacaagtgtgagccactgggcctggccttgctggagtgtttaaagcaaatccctaatatcttattatttcatacccaagtccctatcatgacatcgttttttaattgaaaacttaaacattttatattatacaaggagaattagcacatggtggtgggggaataaataaataaggaaaaagacaataagaataatctgtgtttctactgcccagatataatcagcgttaaaatttcatgttatcttttcaagcttttttggttataaataagcatataaagcaaattttggggtggaaaaaaatttcttgtgtttttatttaaatgcctactgaatccattctgtggatgaactgaactactcagcccttccatctgcctggatgctgaagatgctttccattctttgctcaaagctgggcagctctgagctgctggtgccttcaagctgtttgcctgagtggcaggtcatcctgcagggccacaccgttgggtcagaggccacggcttctgaagatctgttgcctcacagtgagcactatgtgcctgtcacctgagcatggcagctgctgctctagtaaccaggcactgattcagtttccccaaagcagtggtagctaagagaatttttctttcggaagagtttcagctgtggcaggggagtcccgtgcccttcccaacgcccctgtttttgtcaccttcctaggcttggagaaccccctgcctgagcgtccccgggaaaaagaagaaccagtggttcgagagacaggtgaggtggtcgactgccacctcagtgacatgctgcagcagctgcacagtgtcaatgcctccaagccctcggagcgtgggctggtcaggcaaggtgggtactgcggggccctgggcggggcaggattgcttggggcatctggaaaaggcaggaggaggcttggccaacaaagcactggtgacttgttcaggccctgtctgcataggaccattggtttccccatttcctgatatccaaggccctgcttccgtggctcctgccgccttttctgatccgtcttttttactctagcacctcgatgtgccaccttcatacgctgtttcttttgctcagtaagttcctattgtatcttcaagacccttgaaataacagacccagatgtactgcagcctcagggctttctccctggtcctggcacgaaagcacttcttccagacaccacatggctcacactgtggcctccttcaagtgtctgctccagtgtcagctctgtgagcatctccctggcccctctgctggtgcttctcatcctcttgcccactgcatagttctccataacacttctcacccaacatagtccaacatgtccttctttgtttattggatttaaattaaggggtttgttgcatgcactgaacgtaacattttgatgtgtttgcaactggcttctgtcttcacagtttcttaattactccaaactggaaaactagatgcctctgactcttaccatgatagaagtcactgatattttgcccatacttaaattgattagtctttgcccctacaaccacagtgtaagctccgtggaggctggggttttgtctgttgctcactgaacctgcaacagtgcctggcacggtaggccttcagtaaatgggtcagtggaatgaaggagtgagtggaacttggtgcgctgtgctgagactttctctgcagagatatctgtgctgctgcttgtctgagcctgctggcagcagaggccctgctttgctcttctctggggccctaggcctctcaactgagcccaggtggggtgcccagcaggcttccctgttccctggtgtgggccacatgtgtggagcagaggggaagaggctggtcctgaccaactaactgtctgtctgtttctgtctcagaggaggctgaggatcctgcctgcatccccatcttctgggtcagcaagtgggtggactattcggacaagtacggccttggtaggtttcttccagaacaggtgggtgactcaggcacagccaggtgaccttttcagttgttacagactctggcctttttgagctcccaggtactgttctcagtgccctcctctctccatcccaggcctcccagttccagctcccagtgctccctgactccccagctttttttttttccagagacagggtcctgctctgtagcccaggctggagtgcagtggcacaatcatggctcactgcagcctcaaactcccaggcccctaagtagctgtgactacaggcgtgcaccattatgctcagctaatttttaaaatattttgtagagatggggtctcattacgttgcccaggctggtctcaaactcctgggctcaaacaatcctcctccctcagcctcccaaagtgctggaatcacaggcatgtgccaccacgcccggtcccactccccactttctattccccctttctgagacctctctccaccgatccctagggtatcagctctgtgataacagcgtgggggtgctcttcaatgactcaacacgcctcatcctctacaatgatggtgacagcctgcagtacatagagcgtgacggcactgagtcctacctcaccgtgagttcccatcccaactccttgatgaagaaggtgagtgccgtccggcccatggggggtggtgttgcagaagtgggacctgtgctggaggatcagactctaattctggaaccccttacctacttttcatccagatcaccctccttaaatatttccgcaattacatgagcgagcacttgctgaaggcaggtgccaacatcacgccgcgcgaaggtgatgagctcgcccggctgccctacctacggacctggttccgcacccgcagcgccatcatcctgcacctcagcaacggcagcgtgcagatcaacttcttccaggtgagctggaggtcaccaggcgcaggagagagctggggtaggctccgcatgcctggcagtggcccatgtgggttgaatgtggagtgagcggctcaggtacctataacctgttgtgtcttccctctactccctaacatacactggcctctgggatcgccaacccctgctgctcttctcttgcaggatcacaccaagctcatcttgtgcccactgatggcagccgtgacctacatcgacgagaagcgggacttccgcacataccgcctgagtctcctggaggagtacggctgctgcaaggagctggccagccggctccgctacgcccgcactatggtggacaagctgctgagctcacgctcggccagcaaccgtctcaaggcctcctaatagctgccctcccctccggactggtgccctcctcactcccacctgcatctggggcccatactggttggctcccgcggtgccatgtctgcagtgtgccccccagccccggtggctgggcagagctgcatcatccttgcaggtgggggttgctgtataagttatttttgtacatgttcgggtgtgggttctacagccttgtccccctccccctcaaccccaccatatgaattgtacagaatatttctattgaattcggaactgtcctttccttggctttatgcacattaaacagatgtgaatattc

SEQ ID NO: 45 - protein, 189 aa, Homo sapiens
  REGION 1..189: note = GTPase HRas
MTEYKLVVVGAGGVGKSALTIQLIQNHFVDEYDPTIEDSYRKQVVIDGETCLLDILDTAGQEEYSAMRDQYMRTGEGFLCVFAINNTKSFEDIHQYREQIKRVKDSDDVPMVLVGNKCDLAARTVESRQAQDLARSYGIPYIETSAKTRQGVEDAFYTLVREIRQHKLRKLNPPDESGPGCMSCKCVLS

SEQ ID NO: 46 - protein, 189 aa, Homo sapiens
  REGION 1..189: note = GTPase NRas
MTEYKLVVVGAGGVGKSALTIQLIQNHFVDEYDPTIEDSYRKQVVIDGETCLLDILDTAGQEEYSAMRDQYMRTGEGFLCVFAINNSKSFADINLYREQIKRVKDSDDVPMVLVGNKCDLPTRTVDTKQAHELAKSYGIPFIETSAKTRQGVEDAFYTLVREIRQYRMKKLNSSDDGTQGCMGLPCVVM

SEQ ID NO: 47 - protein, 189 aa, Homo sapiens [sequence omitted]

SEQ ID NO: 48 - protein, 239 aa, Homo sapiens
  REGION 1..239: note = Apoptosis regulator Bcl-2 (isoform alpha)
MAHAGRTGYDNREIVMKYIHYKLSQRGYEWDAGDVGAAPPGAAPAPGIFSSQPGHTPHPAASRDPVARTSPLQTPAAPGAAAGPALSPVPPVVHLTLRQAGDDFSRRYRRDFAEMSSQLHLTPFTARGRFATVVEELFRDGVNWGRIVAFFEFGGVMCVESVNREMSPLVDNIALWMTEYLNRHLHTWIQDNGGWDAFVELYGPSMRPLFDFSWLSLKTLLSLALVGACITLGAYLGHK

SEQ ID NO: 49 - protein, 603 aa, Homo sapiens
  REGION 1..603: note = Serine/threonine-protein kinase PLK1
MSAAVTAGKLARAPADPGKAGVPGVAAPGAPAAAPPAKEIPEVLVDPRSRRRYVRGRFLGKGGFAKCFEISDADTKEVFAGKIVPKSLLLKPHQREKMSMEISIHRSLAHQHVVGFHGFFEDNDFVFVVLELCRRRSLLELHKRRKALTEPEARYYLRQIVLGCQYLHRNRVIHRDLKLGNLFLNEDLEVKIGDFGLATKVEYDGERKKTLCGTPNYIAPEVLSKKGHSFEVDVWSIGCIMYTLLVGKPPFETSCLKETYLRIKKNEYSIPKHINPVAASLIQKMLQTDPTARPTINELLNDEFFTSGYIPARLPITCLTIPPRFSIAPSSLDPSNRKPLTVLNKGLENPLPERPREKEEPVVRETGEVVDCHLSDMLQQLHSVNASKPSERGLVRQEEAEDPACIPIFWVSKWVDYSDKYGLGYQLCDNSVGVLFNDSTRLILYNDGDSLQYIERDGTESYLTVSSHPNSLMKKITLLKYFRNYMSEHLLKAGANITPREGDELARLPYLRTWFRTRSAIILHLSNGSVQINFFQDHTKLILCPLMAAVTYIDEKRDFRTYRLSLLEEYGCCKELASRLRYARTMVDKLLSSRSASNRLKAS

SEQ ID NO: 50 - protein, 22 aa, synthetic construct
  REGION 1..22: note = Flagellin 22 (flg22)
QRLSTGSRINSAKDDAAGLQIA

SEQ ID NO: 51 - DNA, 22 bp, synthetic construct
  misc_feature 1..22: note = WRKY29 forward primer
  source 1..22: mol_type = other DNA
tatccaacggatcaagagctga

SEQ ID NO: 52 - DNA, 22 bp, synthetic construct
  misc_feature 1..22: note = WRKY29 reverse primer
  source 1..22: mol_type = other DNA
ttttcttgccaaacaccctttt

SEQ ID NO: 53 - DNA, 22 bp, synthetic construct
  misc_feature 1..22: note = FRK1 forward primer
  source 1..22: mol_type = other DNA
tatcttgagctgggaagagagg

SEQ ID NO: 54 - DNA, 22 bp, synthetic construct
  misc_feature 1..22: note = FRK1 reverse primer
  source 1..22: mol_type = other DNA
agtcgaatagtactcggggtca

SEQ ID NO: 55 - DNA, 18 bp, synthetic construct
  misc_feature 1..18: note = WRKY53 forward primer
  source 1..18: mol_type = other DNA
cagacggggatgctacgg

SEQ ID NO: 56 - DNA, 19 bp, synthetic construct
  misc_feature 1..19: note = WRKY53 reverse primer
  source 1..19: mol_type = other DNA
ggcgaggctaatggtggtg

SEQ ID NO: 57 - DNA, 250 bp, synthetic construct
  misc_feature 1..250: note = Pto DC3000 hrpL IR (AB016421)
  source 1..250: mol_type = other DNA
ctgatgactgacatcaccgtgcccttccagctcggaatgcacttcgtcttcccagctttcctgatacggctgacgatacattttgcggaagtgattgcggatcaggttcagcgcgatgccacacagccaggtctgcggtttgctggcatgttgaaacttgtgctcgttacgcagggcttcaagaaacacgcactggagaatgtcatccacatcatcagggttcatcacccgcttttggataaacgccctg

SEQ ID NO: 58 - DNA, 752 bp, synthetic construct
  misc_feature 1..752: note = Cyp51
  source 1..752: mol_type = other DNA
cagcaagtttgacgagtccctggccgctctctaccacgacctcgatatgggcttcacccccatcaacttcatgcttcactgggcccctctcccctggaaccgtaagcgcgaccacgcccagcgcactgttgccaagatctacatggacactatcaaggagcgccgcgccaagggcaacaacgaatccgagcatgacatgatgaagcaccttatgaactctcggtccattgacaatccccgtctttggtagcgatgtcgtatacgattgtcccaactcgaagctcatggaacaaaagaagtttgtcaagtttggccttacgcaaaaagcactcgagtcacacgtccagttaatcgagcgagaggttcttgactacgtcgaaactgatccatccttttctggcagaactagcaccatcgatgtccccaaggcaatggctgagataacaatctttactgcctcacgttctttgcagggtgaggaagttcggagaaaactcactgccgagtttgctgcattggaagcaccgtacaatatggcatcgacccgtacgcttttttcttcgactgcagagataaatacggcgactgctttacctttattctccttggcaaatcaacgactgtctttcttggtcccaagggcaatgactttatcctcaacggcaaacacgccgatctcaacgccgaggacgtttatgggaaacttaccacgcccgtgtttggtgaggaggttgtttatgactgctccaatg

SEQ ID NO: 59 - DNA, 1806 bp, synthetic construct
  misc_feature 1..1806: note = GUS (AB538275)
  source 1..1806: mol_type = other DNA
atgttacgtcctgtagaaaccccaacccgtgaaatcaaaaaactcgacggcctgtgggcattcagtctggatcgcgaaaactgtggaattgatcagcgttggtgggaaagcgcgttacaagaaagccgggcaattgctgtgccaggcagttttaacgatcagttcgccgatgcagatattcgtaattatgcgggcaacgtctggtatcagcgcgaagtctttataccgaaaggttgggcaggccagcgtatcgtgctgcgtttcgatgcggtcactcattacggcaaagtgtgggtcaataatcaggaagtgatggagcatcagggcggctatacgccatttgaagccgatgtcacgccgtatgttattgccgggaaaagtgtacgtatcaccgtttgtgtgaacaacgaactgaactggcagactatcccgccgggaatggtgattaccgacgaaaacggcaagaaaaagcagtcttacttccatgatttctttaactatgccggaatccatcgcagcgtaatgctctacaccacgccgaacacctgggtggacgatatcaccgtggtgacgcatgtcgcgcaagactgtaaccacgcgtctgttgactggcaggtggtggccaatggtgatgtcagcgttgaactgcgtgatgcggatcaacaggtggttgcaactggacaaggcactagcgggactttgcaagtggtgaatccgcacctctggcaaccgggtgaaggttatctctatgaactgtgcgtcacagccaaaagccagacagagtgtgatatctacccgcttcgcgtcggcatccggtcagtggcagtgaagggccaacagttcctgattaaccacaaaccgttctactttactggctttggtcgtcatgaagatgcggacttacgtggcaaaggattcgataacgtgctgatggtgcacgaccacgcattaatggactggattggggccaactcctaccgtacctcgcattacccttacgctgaagagatgctcgactgggcagatgaacatggcatcgtggtgattgatgaaactgctgctgtcggctttaacctctctttaggcattggtttcgaagcgggcaacaagccgaaagaactgtacagcgaagaggcagtcaacggggaaactcagcaagcgcacttacaggcgattaaagagctgatagcgcgtgacaaaaaccacccaagcgtggtgatgtggagtattgccaacgaaccggatacccgtccgcaagtgcacgggaatatttcgccactggcggaagcaacgcgtaaactcgacccgacgcgtccgatcacctgcgtcaatgtaatgttctgcgacgctcacaccgataccatcagcgatctctttgatgtgctgtgcctgaaccgttattacggatggtatgtccaaagcggcgatttggaaacggcagagaaggtactggaaaaagaacttctggcctggcaggagaaactgcatcagccgattatcatcaccgaatacggcgtggatacgttagccgggctgcactcaatgtacaccgacatgtggagtgaagagtatcagtgtgcatggctggatatgtatcaccgcgtctttgatcgcgtcagcgccgtcgtcggtgaacaggtatggaatttcgccgattttgcgacctcgcaaggcatattgcgcgttggcggtaacaagaaagggatcttcactcgcgaccgcaaaccgaagtcggcggcttttctgctgcaaaaacgctggactggcatgaacttcggtgaaaaaccgcagcagggaggcaaacaa

SEQ ID NO: 60 - protein, 542 aa, synthetic construct
  REGION 1..542: note = GUS (AAA72769)
MLRPVETPTREIKKLDGLWAFSLDRENCGIDQRWWESALQESRAIAVPGSFNDQFADADIRNYAGNVWYQREVFIPKGWAGQRIVLRFDAVTHYGKVWVNNQEVMEHQGGYTPFEADVTPYVIAGKSVRITVCVNNELNWQTIPPGMVITDENGKKKQSYFHDFFNYAGIHRSVMLYTTPNTWVDDITVVTHVAQDCNHASVDWQVVANGDVSVELRDADQQVVATGQGTSGTLQVVNPHLWQPGEGYLYELCVTAKSQTECDIYPLRVGIRSVAVKGQQFLINHKPFYFTGFGRHEDADLRGKGFDNVLMVHDHALMDWIGANSYRTSHYPYAEEMLDWADEHGIVVIDETAAVGFNLSLGIGFEAGNKPKELYSEEAVNGETQQAHLQAIKELIARDKNHPSVVMWSIANEPDTRPQVHGNISPLAEATRKLDPTRPITCVNVMFCDAHTDTISDLFDVLCLNRYYGWYVQSGDLETAEKVLEKELLAWQEKLHQPIIITEYGVDTLAGLHSMYTDMWSEEYQCAWLDMYHRVFDRVSKQ

SEQ ID NO: 61 - protein, 220 aa, synthetic construct
  REGION 1..220: note = AvrRpm1 (Q7BE94)
MGCVSSTSRSTGYYSGYENHEEPRVASSPTNRHDRGYETDSEHSNVNLIPNARRVYKESVLWHGTSMQSKIDLRRQGFDVNRKTDGATEGSRTSNSAPTDTLIRNARRHNYLTAYDVTAKNYARRADPESPALVRTIGVKSNFNIELDPESKDENGEISQFSCRTTDSIPKKYIVGSKSSQPGADAKVFKKELSNAGFEVSTSRAGELLRAVQSDSEDDF

SEQ ID NO: 62 - RNA, 24 nt, synthetic construct
  misc_feature 1..24: note = luxA siRNA (sense)
  source 1..24: mol_type = other RNA
caaacagaggtaatgaaatggttg

SEQ ID NO: 63 - RNA, 24 nt, synthetic construct
  misc_feature 1..24: note = luxA siRNA (antisense)
  source 1..24: mol_type = other RNA
caaccatttcattacctctgtttg

SEQ ID NO: 64 - RNA, 24 nt, synthetic construct
  misc_feature 1..24: note = luxB siRNA (sense)
  source 1..24: mol_type = other RNA
atgttaagttgaataagttctgca

SEQ ID NO: 65 - RNA, 24 nt, synthetic construct
  misc_feature 1..24: note = luxB siRNA (antisense)
  source 1..24: mol_type = other RNA
tgctcttgaataagttgaattgat

SEQ ID NO: 66 - DNA, 19 bp, synthetic construct
  misc_feature 1..19: note = eGFP(1-1) Fwd3 RNA Primer
  source 1..19: mol_type = other DNA
agcaaagaccccaacgaga

SEQ ID NO: 67 - DNA, 18 bp, synthetic construct
  misc_feature 1..18: note = eGFP(1-1) Rev3 RNA Primer
  source 1..18: mol_type = other DNA
tcgtccatgccgagagtg

SEQ ID NO: 68 - DNA, 20 bp, synthetic construct
  misc_feature 1..20: note = mCherry(1-1) Fwd1 Primer
  source 1..20: mol_type = other DNA
gaccacctacaaggccaaga

SEQ ID NO: 69 - DNA, 18 bp, synthetic construct
  misc_feature 1..18: note = mCherry(1-1) Rev1 Primer
  source 1..18: mol_type = other DNA
ccgctcgtactgctccac

SEQ ID NO: 70 - DNA, 20 bp, synthetic construct
  misc_feature 1..20: note = Left primer PCDNA3.1+1
  source 1..20: mol_type = other DNA
gaccaccaagcgaaacatgg

SEQ ID NO: 71 - DNA, 20 bp, synthetic construct
  misc_feature 1..20: note = Right primer PCDNA3.1+1
  source 1..20: mol_type = other DNA
ccatgggtcacgacgagatc

SEQ ID NO: 72 - DNA, 5428 bp, synthetic construct
  misc_feature 1..5428: note = pcDNA3.1(+) plasmid
  source 1..5428: mol_type = other DNA
gacggatcgggagatctcccgatcccctatggtgcactctcagtacaatctgctctgatgccgcatagttaagccagtatctgctccctgcttgtgtgttggaggtcgctgagtagtgcgcgagcaaaatttaagctacaacaaggcaaggcttgaccgacaattgcatgaagaatctgcttagggttaggcgttttgcgctgcttcgcgatgtacgggccagatatacgcgttgacattgattattgactagttattaatagtaatcaattacggggtcattagttcatagcccatatatggagttccgcgttacataacttacggtaaatggcccgcctggctgaccgcccaacgacccccgcccattgacgtcaataatgacgtatgttcccatagtaacgccaatagggactttccattgacgtcaatgggtggagtatttacggtaaactgcccacttggcagtacatcaagtgtatcatatgccaagtacgccccctattgacgtcaatgacggtaaatggcccgcctggcattatgcccagtacatgaccttatgggactttcctacttggcagtacatctacgtattagtcatcgctattaccatggtgatgcggttttggcagtacatcaatgggcgtggatagcggtttgactcacggggatttccaagtctccaccccattgacgtcaatgggagtttgttttggcaccaaaatcaacgggactttccaaaatgtcgtaacaactccgccccattgacgcaaatgggcggtaggcgtgtacggtgggaggtctatataagcagagctctctggctaactagagaacccactgcttactggcttatcgaaattaatacgactcactatagggagacccaagctggctagcgtttaaacttaagcttggtaccgagctcggatccactagtccagtgtggtggaattctgcagatatccagcacagtggcggccgctcgagtctagagggcccgtttaaacccgctgatcagcctcgactgtgccttctagttgccagccatctgttgtttgcccctcccccgtgccttccttgaccctggaaggtgccactcccactgtcctttcctaataaaatgaggaaattgcatcgcattgtctgagtaggtgtcattctattctggggggtggggtggggcaggacagcaagggggaggattgggaagacaatagcaggcatgctggggatgcggtgggctctatggcttctgaggcggaaagaaccagctggggctctagggggtatccccacgcgccctgtagcggcgcattaagcgcggcgggtgtggtggttacgcgcagcgtgaccgctacacttgccagcgccctagcgcccgctcctttcgctttcttcccttcctttctcgccacgttcgccggctttccccgtcaagctctaaatcgggggctccctttagggttccgatttagtgctttacggcacctcgaccccaaaaaacttgattagggtgatggttcacgtagtgggccatcgccctgatagacggtttttcgccctttgacgttggagtccacgttctttaatagtggactcttgttccaaactggaacaacactcaaccctatctcggtctattcttttgatttataagggattttgccgatttcggcctattggttaaaaaatgagctgatttaacaaaaatttaacgcgaattaattctgtggaatgtgtgtcagttagggtgtggaaagtccccaggctccccagcaggcagaagtatgcaaagcatgcatctcaattagtcagcaaccaggtgtggaaagtccccaggctccccagcaggcagaagtatgcaaagcatgcatctcaattagtcagcaaccatagtcccgcccctaactccgcccatcccgcccctaactccgcccagttccgcccattctccgccccatggctgactaattttttttatttatgcagaggccgaggccgcctctgcctctgagctattccagaagtagtgaggaggcttttttggaggcctaggcttttgcaaaaagctcccgggagcttgtatatccattttcggatctgatcaagagacaggatgaggatcgtttcgcatgattgaacaagatggattgcacgcaggttctccggccgcttgggtggagaggctattcggctatgactgggcacaacagacaatcggctgctctgatgccgccgtgttccggctgtcagcgcaggggcgcccggttctttttgtcaagaccgacctgtccggtgccctgaatgaactgcaggacgaggcagcgcggctatcgtggctggccacgacgggcgttccttgcgcagctgtgctcgacgttgtcactgaagcgggaagggactggctgctattgggcgaagtgccggggcaggatctcctgtcatctcaccttgctcctgccgagaaagtatccatcatggctgatgcaatgcggcggctgcatacgcttgatccggctacctgcccattcgaccaccaagcgaaacatcgcatcgagcgagcacgtactcggatggaagccggtcttgtcgatcaggatgatctggacgaagagcatcaggggctcgcgccagccgaactgttcgccaggctcaaggcgcgcatgcccgacggcgaggatctcgtcgtgacccatggcgatgcctgcttgccgaatatcatggtggaaaatggccgcttttctggattcatcgactgtggccggctgggtgtggcggaccgctatcaggacatagcgttggctacccgtgatattgctgaagagcttggcggcgaatgggctgaccgcttcctcgtgctttacggtatcgccgctcccgattcgcagcgcatcgccttctatcgccttcttgacgagttcttctgagcgggactctggggttcgaaatgaccgaccaagcgacgcccaacctgccatcacgagatttcgattccaccgccgccttctatgaaaggttgggcttcggaatcgttttccgggacgccggctggatgatcctccagcgcggggatctcatgctggagttcttcgcccaccccaacttgtttattgcagcttataatggttacaaataaagcaatagcatcacaaatttcacaaataaagcatttttttcactgcattctagttgtggtttgtccaaactcatcaatgtatcttatcatgtctgtataccgtcgacctctagctagagcttggcgtaatcatggtcatagctgtttcctgtgtgaaattgttatccgctcacaattccacacaacatacgagccggaagcataaagtgtaaagcctggggtgcctaatgagtgagctaactcacattaattgcgttgcgctcactgcccgctttccagtcgggaaacctgtcgtgccagctgcattaatgaatcggccaacgcgcggggagaggcggtttgcgtattgggcgctcttccgcttcctcgctcactgactcgctgcgctcggtcgttcggctgcggcgagcggtatcagctcactcaaaggcggtaatacggttatccacagaatcaggggataacgcaggaaagaacatgtgagcaaaaggccagcaaaaggccaggaaccgtaaaaaggccgcgttgctggcgtttttccataggctccgcccccctgacgagcatcacaaaaatcgacgctcaagtcagaggtggcgaaacccgacaggactataaagataccaggcgtttccccctggaagctccctcgtgcgctctcctgttccgaccctgccgcttaccggatacctgtccgcctttctcccttcgggaagcgtggcgctttctcatagctcacgctgtaggtatctcagttcggtgtaggtcgttcgctccaagctgggctgtgtgcacgaaccccccgttcagcccgaccgctgcgccttatccggtaactatcgtcttgagtccaacccggtaagacacgacttatcgccactggcagcagccactggtaacaggattagcagagcgaggtatgtaggcggtgctacagagttcttgaagtggtggcctaactacggctacactagaagaacagtatttggtatctgcgctctgctgaagccagttaccttcggaaaaagagttggtagctcttgatccggcaaacaaaccaccgctggtagcggtttttttgtttgcaagcagcagattacgcgcagaaaaaaaggatctcaagaagatcctttgatcttttctacggggtctgacgctcagtggaacgaaaactcacgttaagggattttggtcatgagattatcaaaaaggatcttcacctagatccttttaaattaaaaatgaagttttaaatcaatctaaagtatatatgagtaaacttggtctgacagttaccaatgcttaatcagtgaggcacctatctcagcgatctgtctatttcgttcatccatagttgcctgactccccgtcgtgtagataactacgatacgggagggcttaccatctggccccagtgctgcaatgataccgcgagacccacgctcaccggctccagatttatcagcaataaaccagccagccggaagggccgagcgcagaagtggtcctgcaactttatccgcctccatccagtctattaattgttgccgggaagctagagtaagtagttcgccagttaatagtttgcgcaacgttgttgccattgctacaggcatcgtggtgtcacgctcgtcgtttggtatggcttcattcagctccggttcccaacgatcaaggcgagttacatgatcccccatgttgtgcaaaaaagcggttagctccttcggtcctccgatcgttgtcagaagtaagttggccgcagtgttatcactcatggttatggcagcactgcataattctcttactgtcatgccatccgtaagatgcttttctgtgactggtgagtactcaaccaagtcattctgagaatagtgtatgcggcgaccgagttgctcttgcccggcgtcaatacgggataataccgcgccacatagcagaactttaaaagtgctcatcattggaaaacgttcttcggggcgaaaactctcaaggatcttaccgctgttgagatccagttcgatgtaacccactcgtgcacccaactgatcttcagcatcttttactttcaccagcgtttctgggtgagcaaaaacaggaaggcaaaatgccgcaaaaaagggaataagggcgacacggaaatgttgaatactcatactcttcctttttcaatattattgaagcatttatcagggttattgtctcatgagcggatacatatttgaatgtatttagaaaaataaacaaataggggttccgcgcacatttccccgaaaagtgccacctgacgtc

SEQ ID NO: 73 - DNA, 4107 bp, unidentified
  misc_feature 1..4107: note = Cas9 coding sequence
  source 1..4107: mol_type = genomic DNA
atggataaaaaatacagcattggtctggacattggcacgaatagcgttggttgggcagtgattaccgatgaatacaaagtcccgtcgaaaaaattcaaagtgctgggtaacaccgatcgccatagcattaagaaaaacctgatcggtgcgctgctgtttgattctggcgaaaccgcggaagcaacgcgtctgaaacgtaccgcacgtcgccgttacacgcgccgtaaaaatcgtatttgctatctgcaggaaatctttagcaacgaaatggcgaaagtcgatgactcatttttccaccgcctggaagaatcgtttctggtggaagaagataaaaaacatgaacgtcacccgattttcggcaatatcgttgatgaagtcgcgtaccatgaaaaatatccgacgatttaccacctgcgtaaaaaactggtggattctaccgacaaagccgatctgcgcctgatttatctggcactggctcatatgatcaaatttcgtggtcacttcctgattgaaggcgacctgaacccggataatagtgacgtcgataaactgtttattcagctggtgcaaacctataatcagctgttcgaagaaaacccgatcaatgcaagtggtgttgatgcgaaagccattctgtccgctcgcctgagtaaatcccgccgtctggaaaacctgattgcacagctgccgggtgaaaagaaaaacggtctgtttggcaatctgatcgctctgtcactgggcctgacgccgaactttaaatcgaatttcgacctggcagaagatgctaaactgcagctgagcaaagatacctacgatgacgatctggacaacctgctggcgcaaattggcgaccagtatgccgacctgtttctggcggccaaaaatctgtcagatgccattctgctgtcggacatcctgcgcgtgaacaccgaaatcacgaaagcgccgctgtcagcctcgatgattaaacgctacgatgaacatcaccaggacctgaccctgctgaaagcactggttcgtcagcaactgccggaaaaatacaaagaaattttctttgaccaaagtaaaaatggttatgcaggctacatcgatggcggtgcttcccaggaagaattctacaaattcatcaaaccgatcctggaaaaaatggatggtacggaagaactgctggtgaaactgaatcgtgaagatctgctgcgtaaacaacgcacctttgacaacggtagcattccgcatcagatccacctgggcgaactgcatgcgattctgcgccgtcaggaagatttttatccgttcctgaaagacaaccgtgaaaaaatcgaaaaaatcctgacgtttcgcatcccgtattacgttggtccgctggcacgtggtaatagccgcttcgcatggatgacccgcaaatctgaagaaaccattacgccgtggaactttgaagaagtggttgataaaggcgcaagcgctcagtcttttatcgaacgtatgaccaatttcgataaaaacctgccgaatgaaaaagtgctgccgaaacattctctgctgtatgaatactttaccgtttacaacgaactgacgaaagtgaaatatgttaccgagggtatgcgcaaaccggcgtttctgagtggcgaacagaaaaaagccattgtggatctgctgttcaaaaccaatcgtaaagttacggtcaaacagctgaaagaagattacttcaagaaaattgaatgtttcgacagcgtggaaatttctggtgttgaagatcgtttcaacgcctctctgggcacctatcatgacctgctgaaaatcatcaaagacaaagattttctggataacgaagaaaacgaagacattctggaagatatcgtgctgaccctgacgctgttcgaagatcgtgaaatgattgaagaacgcctgaaaacgtacgcacacctgtttgacgataaagttatgaaacagctgaaacgccgtcgctataccggttggggccgtctgagccgcaaactgattaatggtatccgcgataaacaatcaggcaaaacgattctggatttcctgaaatcggacggctttgccaaccgtaatttcatgcagctgatccatgacgattccctgacctttaaagaagacattcagaaagcacaagtgtcaggtcaaggcgattcgctgcatgaacacattgcgaacctggccggttcaccggctatcaaaaaaggcatcctgcagaccgtgaaagtcgtggatgaactggtgaaagttatgggtcgtcacaaaccggaaaacattgttatcgaaatggcgcgcgaaaatcagaccacgcaaaaaggccagaaaaactcgcgtgaacgcatgaaacgcattgaagaaggtatcaaagaactgggcagccagattctgaaagaacatccggtcgaaaacacccagctgcaaaatgaaaaactgtacctgtattacctgcaaaatggtcgtgacatgtatgtggatcaggaactggacatcaaccgcctgtctgactatgatgtcgaccacattgtgccgcagagctttctgaaagacgattctatcgataacaaagttctgacccgtagtgataaaaaccgcggcaaaagcgacaatgtcccgtctgaagaagttgtgaagaaaatgaaaaactactggcgtcaactgctgaatgcgaaactgattacgcagcgtaaattcgataacctgaccaaagcggaacgcggcggtctgtccgaactggataaagccggttttatcaaacgtcaactggttgaaacccgccagattacgaaacatgtcgcccagatcctggattcacgcatgaacacgaaatacgacgaaaacgataaactgatccgtgaagtcaaagtgatcaccctgaaaagtaaactggtttccgatttccgtaaagactttcagttctacaaagtccgcgaaattaacaattaccatcacgcacacgatgcttatctgaatgcagtggttggtaccgctctgatcaaaaaatatccgaaactggaaagcgaatttgtgtatggcgattacaaagtctatgacgtgcgcaaaatgattgcgaaatccgaacaggaaatcggcaaagcgaccgccaaatactttttctattcaaacatcatgaactttttcaaaaccgaaattacgctggcaaatggtgaaattcgtaaacgcccgctgatcgaaaccaacggtgaaacgggcgaaattgtgtgggataaaggccgtgacttcgcgaccgttcgcaaagtcctgtcgatgccgcaagtgaatatcgtgaagaaaaccgaagtgcagacgggcggttttagtaaagaatccatcctgccgaaacgtaacagcgataaactgattgcgcgcaaaaaagattgggacccgaaaaaatacggcggttttgatagtccgacggttgcatattccgtcctggtcgtggctaaagtcgaaaaaggtaaaagtaaaaaactgaaatccgtgaaagaactgctgggcattaccatcatggaacgtagctcttttgagaaaaacccgattgacttcctggaagccaaaggttacaaagaagtgaaaaaagatctgatcatcaaactgccgaaatatagcctgttcgaactggaaaacggccgtaaacgcatgctggcatctgctggtgaactgcagaaaggcaatgaactggcactgccgagtaaatatgttaactttctgtacctggctagccattatgaaaaactgaaaggttctccggaagataacgaacagaaacaactgttcgtcgaacaacataaacactacctggatgaaatcatcgaacagatctcagaattctcgaaacgcgtgattctggcggatgccaatctggacaaagttctgagcgcgtataacaaacatcgtgataaaccgattcgcgaacaggccgaaaatattatccacctgtttaccctgacgaacctgggcgcaccggcagcttttaaatacttcgataccacgatcgaccgtaaacgctatacctcaacgaaagaagttctggatgctaccctgattcatcaatcgatcaccggtctgtatgaaacgcgtattgatctgagtcagctgggcggtgactaa

SEQ ID NO: 74 - protein, 1368 aa, unidentified [sequence omitted]

SEQ ID NO: 75 - DNA, 57 bp, synthetic construct
  misc_feature 1..57: note = GT1 sense siRNA against plant GUS (beta-glucuronidase)
  source 1..57: mol_type = other DNA
tacactgtggaattgatcagcgttcagatgacgctgatcaattccacagtttttttt

SEQ ID NO: 76 - DNA, 61 bp, synthetic construct
  misc_feature 1..61: note = GT1 antisense siRNA against plant GUS (beta-glucuronidase)
  source 1..61: mol_type = other DNA
ctagaaaaaaaactgtggaattgatcagcgtcatctgaacgctgatcaattccacagtgta

SEQ ID NO: 77 - DNA, 57 bp, synthetic construct
  misc_feature 1..57: note = GT2 sense siRNA against plant GUS (beta-glucuronidase)
  source 1..57: mol_type = other DNA
tacttgatcagcgttggtgggattcagatgatcccaccaacgctgatcaattttttt

SEQ ID NO: 78 - DNA, 61 bp, synthetic construct
  misc_feature 1..61: note = GT2 antisense siRNA against plant GUS (beta-glucuronidase)
  source 1..61: mol_type = other DNA
ctagaaaaaaattgatcagcgttggtgggatcatctgaatcccaccaacgctgatcaagta

SEQ ID NO: 79 - DNA, 57 bp, synthetic construct
  misc_feature 1..57: note = GT3 sense siRNA against plant GUS (beta-glucuronidase)
  source 1..57: mol_type = other DNA
tacctgtggaattgatcagcgtttcagatgaacgctgatcaattccacagttttttt

SEQ ID NO: 80 - DNA, 61 bp, synthetic construct
  misc_feature 1..61: note = GT3 antisense siRNA against plant GUS (beta-glucuronidase)
  source 1..61: mol_type = other DNA
ctagaaaaaaactgtggaattgatcagcgttcatctgaaacgctgatcaattccacaggta

SEQ ID NO: 81 - DNA, 1812 bp, Arabidopsis thaliana
  misc_feature 1..1812: note = Beta-glucuronidase (GUS) encoding nucleic acid
  source 1..1812: mol_type = genomic DNA
atggtccgtcctgtagaaaccccaacccgtgaaatcaaaaaactcgacggcctgtgggcattcagtctggatcgcgaaaactgtggaattgatcagcgttggtgggaaagcgcgttacaagaaagccgggcaattgctgtgccaggcagttttaacgatcagttcgccgatgcagatattcgtaattatgcgggcaacgtctggtatcagcgcgaagtctttataccgaaaggttgggcaggccagcgtatcgtgctgcgtttcgatgcggtcactcattacggcaaagtgtgggtcaataatcaggaagtgatggagcatcagggcggctatacgccatttgaagccgatgtcacgccgtatgttattgccgggaaaagtgtacgtatcaccgtttgtgtgaacaacgaactgaactggcagactatcccgccgggaatggtgattaccgacgaaaacggcaagaaaaagcagtcttacttccatgatttctttaactatgccggaatccatcgcagcgtaatgctctacaccacgccgaacacctgggtggacgatatcaccgtggtgacgcatgtcgcgcaagactgtaaccacgcgtctgttgactggcaggtggtggccaatggtgatgtcagcgttgaactgcgtgatgcggatcaacaggtggttgcaactggacaaggcactagcgggactttgcaagtggtgaatccgcacctctggcaaccgggtgaaggttatctctatgaactgtgcgtcacagccaaaagccagacagagtgtgatatctacccgcttcgcgtcggcatccggtcagtggcagtgaagggcgaacagttcctgattaaccacaaaccgttctactttactggctttggtcgtcatgaagatgcggacttacgtggcaaaggattcgataacgtgctgatggtgcacgaccacgcattaatggactggattggggccaactcctaccgtacctcgcattacccttacgctgaagagatgctcgactgggcagatgaacatggcatcgtggtgattgatgaaactgctgctgtcggctttaacctctctttaggcattggtttcgaagcgggcaacaagccgaaagaactgtacagcgaagaggcagtcaacggggaaactcagcaagcgcacttacaggcgattaaagagctgatagcgcgtgacaaaaaccacccaagcgtggtgatgtggagtattgccaacgaaccggatacccgtccgcaaggtgcacgggaatatttcgcgccactggcggaagcaacgcgtaaactcgacccgacgcgtccgatcacctgcgtcaatgtaatgttctgcgacgctcacaccgataccatcagcgatctctttgatgtgctgtgcctgaaccgttattacggatggtatgtccaaagcggcgatttggaaacggcagagaaggtactggaaaaagaacttctggcctggcaggagaaactgcatcagccgattatcatcaccgaatacggcgtggatacgttagccgggctgcactcaatgtacaccgacatgtggagtgaagagtatcagtgtgcatggctggatatgtatcaccgcgtctttgatcgcgtcagcgccgtcgtcggtgaacaggtatggaatttcgccgattttgcgacctcgcaaggcatattgcgcgttggcggtaacaagaaagggatcttcactcgcgaccgcaaaccgaagtcggcggcttttctgctgcaaaaacgctggactggcatgaacttcggtgaaaaaccgcagcagggaggcaaacaatga

SEQ ID NO: 82 - protein, 603 aa, Arabidopsis thaliana
  REGION 1..603: note = Q93VY4 ARATH Beta-glucuronidase
MVRPVETPTREIKKLDGLWAFSLDRENCGIDQRWWESALQESRAIAVPGSFNDQFADADIRNYAGNVWYQREVFIPKGWAGQRIVLRFDAVTHYGKVWVNNQEVMEHQGGYTPFEADVTPYVIAGKSVRITVCVNNELNWQTIPPGMVITDENGKKKQSYFHDFFNYAGIHRSVMLYTTPNTWVDDITVVTHVAQDCNHASVDWQVVANGDVSVELRDADQQVVATGQGTSGTLQVVNPHLWQPGEGYLYELCVTAKSQTECDIYPLRVGIRSVAVKGEQFLINHKPFYFTGFGRHEDADLRGKGFDNVLMVHDHALMDWIGANSYRTSHYPYAEEMLDWADEHGIVVIDETAAVGFNLSLGIGFEAGNKPKELYSEEAVNGETQQAHLQAIKELIARDKNHPSVVMWSIANEPDTRPQGAREYFAPLAEATRKLDPTRPITCVNVMFCDAHTDTISDLFDVLCLNRYYGWYVQSGDLETAEKVLEKELLAWQEKLHQPIIITEYGVDTLAGLHSMYTDMWSEEYQCAWLDMYHRVFDRVSAVVGEQVWNFADFATSQGILRVGGNKKGIFTRDRKPKSAAFLLQKRWTGMNFGEKPQQGGKQ

SEQ ID NO: 83 - RNA, 24 nt, synthetic construct
  misc_feature 1..24: note = DEGFP, siRNA sense
  source 1..24: mol_type = other RNA
gcaagctgaccctgaagttcattt

SEQ ID NO: 84 - DNA, 19 bp, synthetic construct
  misc_feature 1..19: note = firefly luciferase shRNA
  source 1..19: mol_type = other DNA
ctgacgcggaatacttcga

SEQ ID NO: 85 - RNA, 24 nt, synthetic construct
  misc_feature 1..24: note = LuxA (Lux operon) siRNA, sense
  source 1..24: mol_type = other RNA
caaacagaggtaatgaaatggttg

SEQ ID NO: 86 - RNA, 24 nt, synthetic construct
  misc_feature 1..24: note = luxB (Lux operon) siRNA, sense
  source 1..24: mol_type = other RNA
atgttaagttgaataagttctgca

SEQ ID NO: 87 - RNA, 24 nt, synthetic construct
  misc_feature 1..24: note = DEGFP, siRNA antisense
  source 1..24: mol_type = other RNA
atgaacttcagggtcagcttgccg

SEQ ID NO: 88 - RNA, 24 nt, synthetic construct
  misc_feature 1..24: note = LuxA (Lux operon) siRNA, antisense
  source 1..24: mol_type = other RNA
caaccatttcattacctctgtttg

SEQ ID NO: 89 - RNA, 24 nt, synthetic construct
  misc_feature 1..24: note = LuxB (Lux operon) siRNA, antisense
  source 1..24: mol_type = other RNA
tgctcttgaataagttgaattgat

SEQ ID NO: 90 - DNA, 19 bp, Homo sapiens
  source 1..19: mol_type = other DNA; note = siMYCN-1
cggagatgctgcttgagaa

SEQ ID NO: 91 - DNA, 19 bp, Homo sapiens
  source 1..19: mol_type = other DNA; note = siMYCN-2
cggagttggtaaagaatga

SEQ ID NO: 92 - DNA, 19 bp, Homo sapiens
  source 1..19: mol_type = other DNA; note = siMYCN-3
cagcagttgctaaagaaaa

SEQ ID NO: 93 - RNA, 21 nt, unidentified
  source 1..21: mol_type = other RNA; note = MYCN siRNA (sense)
cagcagttgctaaagaaaatt

SEQ ID NO: 94 - RNA, 21 nt, unidentified
  source 1..21: mol_type = other RNA; note = MYCN siRNA (antisense)
ttttctttagcaactgctgtt

SEQ ID NO: 95 - RNA, 19 nt, unidentified
  source 1..19: mol_type = other RNA; note = MYCN siRNA
tgatctgcaagaacccaga

SEQ ID NO: 96 - DNA, 15 bp, unidentified
  source 1..15: mol_type = other DNA; note = MYCN ASO
aacgttgaggggcat

SEQ ID NO: 97 - RNA, 24 nt, unidentified
  source 1..24: mol_type = other RNA; note = RAS synthetic miRNA (sense)
  misc_feature 3: note = mismatch base pair
  misc_feature 10: note = mismatch base pair
  misc_feature 18: note = mismatch base pair
  misc_feature 20: note = mismatch base pair
ggtctctacgtcgtgacgtggagt

SEQ ID NO: 98 - RNA, 24 nt, unidentified
  source 1..24: mol_type = other RNA; note = wild-type RAS synthetic miRNA (anti-sense)
tgagatgaagcactgtagctcagg

SEQ ID NO: 99 - RNA, 24 nt, unidentified
  source 1..24: mol_type = other RNA; note = RAS synthetic miRNA (anti-sense)
ggtctctacgtcgtgacgtggagt

SEQ ID NO: 100 - RNA, 25 nt, unidentified
  source 1..25: mol_type = other RNA; note = KRAS siRNA
aatgcatgacaacactggatgaccg

SEQ ID NO: 101 - RNA, 25 nt, unidentified
  source 1..25: mol_type = other RNA; note = siR-HRAS siRNA
ccatccagctgatccagaaccattt

SEQ ID NO: 102 - RNA, 38 nt, unidentified; identical to SEQ ID NO: 26
  source 1..38: mol_type = other RNA; note = RAS siRNA

SEQ ID NO: 103 - DNA, 17 bp, unidentified
  source 1..17: mol_type = other DNA; note = mutated K-RAS ASO
ctacgccacaagctcca

SEQ ID NO: 104 - RNA, 19 nt, unidentified
  source 1..19: mol_type = other RNA; note = BCL2 3p-siRNA (sense)
gcatgcggcctctgtttga

SEQ ID NO: 105 - RNA, 19 nt, unidentified
  source 1..19: mol_type = other RNA; note = BCL2 3p-siRNA (anti-sense)
cgtacgccggagacaaact

SEQ ID NO: 106 - DNA, 18 bp, unidentified
  source 1..18: mol_type = other DNA; note = BCL2 ASO
tctcccagcgtgcgccat

SEQ ID NO: 107 - RNA, 21 nt, unidentified
  source 1..21: mol_type = other RNA; note = PLK1 modified siRNA (sense)
  modified_base 4: mod_base = OTHER; note = 2'-O-methylated modified nucleotide
  modified_base 10: mod_base = OTHER; note = 2'-O-methylated modified nucleotide
  modified_base 14: mod_base = OTHER; note = 2'-O-methylated modified nucleotide
  modified_base 18: mod_base = OTHER; note = 2'-O-methylated modified nucleotide
agatcaccctccttaaatatt

SEQ ID NO: 108 - RNA, 21 nt, unidentified
  source 1..21: mol_type = other RNA; note = PLK1 modified siRNA (antisense)
  modified_base 8: mod_base = OTHER; note = 2'-O-methylated modified nucleotide
  modified_base 17: mod_base = OTHER; note = 2'-O-methylated modified nucleotide
tatttaaggagggtgatcttt

SEQ ID NO: 109 - RNA, 21 nt, unidentified
  source 1..21: mol_type = other RNA; note = PLK1 siRNA
aagggcggctttgccaagtgc

SEQ ID NO: 110 - DNA, 20 bp, unidentified
  source 1..20: mol_type = other DNA; note = PLK1 ASO
accagtccggaggggagggc

SEQ ID NO: 111 - protein, 238 aa, synthetic construct
  source 1..238: note = GFP
MSKGEELFTGVVPILVELDGDVNGHKFSVSGEGEGDATYGKLTLKFICTTGKLPVPWPTLVTTFSYGVQCFSRYPDHMKQHDFFKSAMPEGYVQERTIFFKDDGNYKTRAEVKFEGDTLVNRIELKGIDFKEDGNILGHKLEYNYNSHNVYIMADKQKNGIKVNFKIRHNIEDGSVQLADHYQQNTPIGDGPVLLPDNHYLSTQSALSKDPNEKRDHMVLLEFVTAAGITHGMDELYK

SEQ ID NO: 112 - protein, 550 aa, synthetic construct
  source 1..550: note = Luciferase
MEDAKNIKKGPAPFYPLEDGTAGEQLHKAMKRYALVPGTIAFTDAHIEVNITYAEYFEMSVRLAEAMKRYGLNTNHRIVVCSENSLQFFMPVLGALFIGVAVAPANDIYNERELLNSMNISQPTVVFVSKKGLQKILNVQKKLPIIQKIIIMDSKTDYQGFQSMYTFVTSHLPPGFNEYDFVPESFDRDKTIALIMNSSGSTGLPKGVALPHRTACVRFSHARDPIFGNQIIPDTAILSVVPFHHGFGMFTTLGYLICGFRVVLMYRFEEELFLRSLQDYKIQSALLVPTLFSFFAKSTLIDKYDLSNLHEIASGGAPLSKEVGEAVAKRFHLPGIRQGYGLTETTSAILITPEGDDKPGAVGKVVPFFEAKVVDLDTGKTLGVNQRGELCVRGPMIMSGYVNNPEATNALIDKDGWLHSGDIAYWDEDEHFFIVDRLKSLIKYKGYQVAPAELESILLQHPNIFDAGVAGLPDDDAGELPAAVVVLEHGKTMTEKEIVDYVASQVTTAKKLRGGVVFVDEVPKGLTGKLDARKIREILIKAKKGGKSKL

SEQ ID NO: 113 - protein, 527 aa, Homo sapiens
  source 1..527: note = Catalase
MADSRDPASDQMQHWKEQRAAQKADVLTTGAGNPVGDKLNVITVGPRGPLLVQDVVFTDEMAHFDRERIPERVVHAKGAGAFGYFEVTHDITKYSKAKVFEHIGKKTPIAVRFSTVAGESGSADTVRDPRGFAVKFYTEDGNWDLVGNNTPIFFIRDPILFPSFIHSQKRNPQTHLKDPDMVWDFWSLRPESLHQVSFLFSDRGIPDGHRHMNGYGSHTFKLVNANGEAVYCKFHYKTDQGIKNLSVEDAARLSQEDPDYGIRDLFNAIATGKYPSWTFYIQVMTFNQAETFPFNPFDLTKVWPHKDYPLIPVGKLVLNRNPVNYFAEVEQIAFDPSNMPPGIEASPDKMLQGRLFAYPDTHRHRLGPNYLHIPVNCPYRARVANYQRDGPMCMQDNQGGAPNYYPNSFGAPEQQPSALEHSIQYSGEVRRFNTANDDNVTQVRAFYVNVLNEEQRKRLCENIAGHLKDAQIFIQKKAVKNFTEVHPDYGSHIQALLDKYNAEKPKNAIHTFVQSGSHLAAREKANL

SEQ ID NO: 114 - protein, 386 aa, synthetic construct
  source 1..386: note = ovalbumin
MGSIGAASMEFCFDVFKELKVHHANENIFYCPIAIMSALAMVYLGAKDSTRTQINKVVRFDKLPGFGDSIEAQCGTSVNVHSSLRDILNQITKPNDVYSFSLASRLYAEERYPILPEYLQCVKELYRGGLEPINFQTAADQARELINSWVESQTNGIIRNVLQPSSVDSQTAMVLVNAIVFKGLWEKAFKDEDTQAMPFRVTEQESKPVQMMYQIGLFRVASMASEKMKILELPFASGTMSMLVLLPDEVSGLEQLESIINFEKLTEWTSSNVMEERKIKVYLPRMKMEEKYNLTSVLMAMGITDVFSSSANLSGISSAESLKISQAVHAAHAEINEAGREVVGSAEAGVDAASVSEEFRADHPFLFCIKHIATNAVLFFGRCVSP

SEQ ID NO: 115 - protein, 22 aa, synthetic construct
  source 1..22: note = Flagellin peptide (flg22)
QRLSTGSRINSAKDDAAGLQIA

SEQ ID NO: 116 - protein, 651 aa, Homo sapiens
  source 1..651: note = GUS
MARGSAVAWAALGPLLWGCALGLQGGMLYPQESPSRECKELDGLWSFRADFSDNRRRGFEEQWYRRPLWESGPTVDMPVPSSFNDISQDWRLRHFVGWVWYEREVILPERWTQDLRTRVVLRIGSAHSYAIVWVNGVDTLEHEGGYLPFEADISNLVQVGPLPSRLRITIAINNTLTPTTLPPGTIQYLTDTSKYPKGYFVQNTYFDFFNYAGLQRSVLLYTTPTTYIDDITVTTSVEQDSGLVNYQISVKGSNLFKLEVRLLDAENKVVANGTGTQGQLKVPGVSLWWPYLMHERPAYLYSLEVQLTAQTSLGPVSDFYTLPVGIRTVAVTKSQFLINGKPFYFHGVNKHEDADIRGKGFDWPLLVKDFNLLRWLGANAFRTSHYPYAEEVMQMCDRYGIVVIDECPGVGLALPQFFNNVSLHHHMQVMEEVVRRDKNHPAVVMWSVANEPASHLESAGYYLKMVIAHTKSLDPSRPVTFVSNSNYAADKGAPYVDVICLNSYYSWYHDYGHLELIQLQLATQFENWYKKYQKPIIQSEYGAETIAGFHQDPPLMFTEEYQKSLLEQYHLGLDQKRRKYVVGELIWNFADFMTEQSPTRVLGNKKGIFTRQRQPKSAAFLLRERYWKIANETRYPHSVAKSQCLENSLFT

SEQ ID NO: 117 - DNA, 5428 bp, synthetic construct; identical to SEQ ID NO: 72
  source 1..5428: mol_type = other DNA; note = Plasmid pcDNA3.1

SEQ ID NO: 118 - DNA, 4703 bp, synthetic construct
  source 1..4703: mol_type = other DNA; note = Plasmid pEGFP-N1
tagttattaatagtaatcaattacggggtcattagttcatagcccatatatggagttccgcgttacataacttacggtaaatggcccgcctggctgaccgcccaacgacccccgcccattgacgtcaataatgacgtatgttcccatagtaacgccaatagggactttccattgacgtcaatgggtggagtatttacggtaaactgcccacttggcagtacatcaagtgtatcatatgccaagtacgccccctattgacgtcaatgacggtaaatggcccgcctggcattatgcccagtacatgaccttatgggactttcctacttggcagtacatctacgtattagtcatcgctattaccatggtgatgcggttttggcagtacatcaatgggcgtggatagcggtttgactcacggggatttccaagtctccaccccattgacgtcaatgggagtttgttttggcaccaaaatcaacgggactttccaaaatgtcgtaacaactccgccccattgacgcaaatgggcggtaggcgtgtacggtgggaggtctatataagcagagctggtttagtgaaccgtcagatccgctagcgctaccggactcagatctcgagctcaagcttcgaattctgcagtcgacggtaccgcgggcccgggatccaccggtcgccaccatggtgagcaagggcgaggagctgttcaccggggtggtgcccatcctggtcgagctggacggcgacgtaaacggccacaagttcagcgtgtccggcgagggcgagggcgatgccacctacggcaagctgaccctgaagttcatctgcaccaccggcaagctgcccgtgccctggcccaccctcgtgaccaccctgacctacggcgtgcagtgcttcagccgctaccccgaccacatgaagcagcacgacttcttcaagtccgccatgcccgaaggctacgtccaggagcgcaccatcttcttcaaggacgacggcaactacaagacccgcgccgaggtgaagttcgagggcgacaccctggtgaaccgcatcgagctgaagggcatcgacttcaaggaggacggcaacatcctggggcacaagctggagtacaactacaacagccacaacgtctatatcatggccgacaagcagaagaacggcatcaaggtgaacttcaagatccgccacaacatcgaggacggcagcgtgcagctcgccgaccactaccagcagaacacccccatcggcgacggccccgtgctgctgcccgacaaccactacctgagcacccagtccgccctgagcaaagaccccaacgagaagcgcgatcacatggtcctgctggagttcgtgaccgccgccgggatcactctcggcatggacgagctgtacaagtaaagcggccgcgactctagatcataatcagccataccacatttgtagaggttttacttgctttaaaaaacctcccacacctccccctgaacctgaaacataaaatgaatgcaattgttgttgttaacttgtttattgcagcttataatggttacaaataaagcaatagcatcacaaatttcacaaataaagcatttttttcactgcattctagttgtggtttgtccaaactcatcaatgtatcttaaggcgtaaattgtaagcgttaatattttgttaaaattcgcgttaaatttttgttaaatcagctcattttttaaccaataggccgaaatcggcaaaatcccttataaatcaaaagaatagaccgagatagggttgagtgttgttccagtttggaacaagagtccactattaaagaacgtggactccaacgtcaaagggcgaaaaaccgtctatcagggcgatggcccactacgtgaaccatcaccctaatcaagtttttgtgccgtaaagcactaaatcggaaccctaaagggagcccccgatttagagcttgacggggaaagccggcgaacgtggcgagaaaggaagggaagaaagcgaaaggagcgggcgctagggcgctggcaagtgtagcggtcacgctgcgcgtaaccaccacacccgccgcgcttaatgcgccgctacagggcgcgtcaggtggcacttttcggggaaatgtgcgcggaacccctatttgtttatttttctaaatacattcaaatatgtatccgctcatgagacaataaccctgataaatgcttcaataatattgaaaaaggaagagtcctgaggcggaaagaaccagctgtggaatgtgtgtcagttagggtgtggaaagtccccaggctccccagcaggcagaagtatgcaaagcatgcatctcaattagtcagcaaccaggtgtggaaagtccccaggctccccagcaggcagaagtatgcaaagcatgcatctcaattagtcagcaaccatagtcccgcccctaactccgcccatcccgcccctaactccgcccagttccgcccattctccgccccatggctgactaattttttttatttatgcagaggccgaggccgcctcggcctctgagctattccagaagtagtgaggaggcttttttggaggcctaggcttttgcaaagatcgatcaagagacaggatgaggatcgtttcgcatgattgaacaagatggattgcacgcaggttctccggccgcttgggtggagaggctattcggctatgactgggcacaacagacaatcggctgctctgatgccgccgtgttccggctgtcagcgcaggggcgcccggttctttttgtcaagaccgacctgtccggtgccctgaatgaactgcaagacgaggcagcgcggctatcgtggctggccacgacgggcgttccttgcgcagctgtgctcgacgttgtcactgaagcgggaagggactggctgctattgggcgaagtgccggggcaggatctcctgtcatctcaccttgctcctgccgagaaagtatccatcatggctgatgcaatgcggcggctgcatacgcttgatccggctacctgcccattcgaccaccaagcgaaacatcgcatcgagcgagcacgtactcggatggaagccggtcttgtcgatcaggatgatctggacgaagagcatcaggggctcgcgccagccgaactgttcgccaggctcaaggcgagcatgcccgacggcgaggatctcgtcgtgacccatggcgatgcctgcttgccgaatatcatggtggaaaatggccgcttttctggattcatcgactgtggccggctgggtgtggcggaccgctatcaggacatagcgttggctacccgtgatattgctgaagagcttggcggcgaatgggctgaccgcttcctcgtgctttacggtatcgccgctcccgattcgcagcgcatcgccttctatcgccttcttgacgagttcttctgagcgggactctggggttcgaaatgaccgaccaagcgacgcccaacctgccatcacgagatttcgattccaccgccgccttctatgaaaggttgggcttcggaatcgttttccgggacgccggctggatgatcctccagcgcggggatctcatgctggagttcttcgcccaccctagggtgaaacacggaaggagacaataccggaaggaacccgcgcttaaaaagacagaataaaacgcacggtgttgggtcgtttgttcataaacgcggggttcggtcccagggctggcactctgtcgataccccaccgagaccccattggggccaatacgcccgcgtttcttccttttccccaccccaccccccaagttcgggtgaaggcccagggctcgcagccaacgtcggggcggcaggccctgccatagcctcaggttactcatatatactttagattgatttaaaacttcatttttaatttaaaaggatctaggtgaagatcctttttgataatctcatgaccaaaatcccttaacgtgagttttcgttccactgagcgtcagaccccgtagaaaagatcaaaggatcttcttgagatcctttttttctgcgcgtaatctgctgcttgcaaacaaaaaaaccaccgctaccagcggtggtttgtttgccggatcaagagctaccaactctttttccgaaggtaactggcttcagcagagcgcagataccaaatactgtccttctagtgtagccgtagttaggccaccacttcaagaactctgtagcaccgcctacatacctcgctctgctaatcctgttaccagtggctgctgccagtggcgataagtcgtgtcttaccgggttggactcaagacgatagttaccggataaggcgcagcggtcgggctgaacggggggttcgtgcacacagcccagcttggagcgaacgacctacaccgaactgagatacctacagcgtgagctatgagaaagcgccacgcttcccgaagggagaaaggcggacaggtatccggtaagcggcagggtcggaacaggagagcgcacgagggagcttccagggggaaacgcctggtatctttatagtcctgtcgggtttcgccacctctgacttgagcgtcgatttttgtgatgctcgtcaggggggcggagcctatggaaaaacgccagcaacgcggcctttttacggttcctggccttttgctggccttttgctcacatgttctttcctgcgttatcccctgattctgtggataaccgtattaccgccatgcat

SEQ ID NO: 119 - DNA, 16 bp, synthetic construct
  source 1..16: mol_type = other DNA; note = ASO k-ras
gctattaggagtcttt

SEQ ID NO: 120 - DNA, 15 bp, synthetic construct
  source 1..15: mol_type = other DNA; note = c-myc ASO
aacgttgaggggcat

SEQ ID NO: 121 - RNA, 720 nt, synthetic construct
  source 1..720: mol_type = other RNA; note = eGFP mRNA
atggtgagcaagggcgaggagctgttcaccggggtggtgcccatcctggtcgagctggacggcgacgtaaacggccacaagttcagcgtgtccggcgagggcgagggcgatgccacctacggcaagctgaccctgaagttcatctgcaccaccggcaagctgcccgtgccctggcccaccctcgtgaccaccctgacctacggcgtgcagtgcttcagccgctaccccgaccacatgaagcagcacgacttcttcaagtccgccatgcccgaaggctacgtccaggagcgcaccatcttcttcaaggacgacggcaactacaagacccgcgccgaggtgaagttcgagggcgacaccctggtgaaccgcatcgagctgaagggcatcgacttcaaggaggacggcaacatcctggggcacaagctggagtacaactacaacagccacaacgtctatatcatggccgacaagcagaagaacggcatcaaggtgaacttcaagatccgccacaacatcgaggacggcagcgtgcagctcgccgaccactaccagcagaacacccccatcggcgacggccccgtgctgctgcccgacaaccactacctgagcacccagtccgccctgagcaaagaccccaacgagaagcgcgatcacatggtcctgctggagttcgtgaccgccgccgggatcactctcggcatggacgagctgtacaagtaa

SEQ ID NO: 122 - RNA, 1653 nt, synthetic construct
  source 1..1653: mol_type = other RNA; note = luciferase mRNA
atggaagacgccaaaaacataaagaaaggcccggcgccattctatcctctagaggatggaaccgctggagagcaactgcataaggctatgaagagatacgccctggttcctggaacaattgcttttacagatgcacatatcgaggtgaacatcacgtacgcggaatacttcgaaatgtccgttcggttggcagaagctatgaaacgatatgggctgaatacaaatcacagaatcgtcgtatgcagtgaaaactctcttcaattctttatgccggtgttgggcgcgttatttatcggagttgcagttgcgcccgcgaacgacatttataatgaacgtgaattgctcaacagtatgaacatttcgcagcctaccgtagtgtttgtttccaaaaaggggttgcaaaaaattttgaacgtgcaaaaaaaattaccaataatccagaaaattattatcatggattctaaaacggattaccagggatttcagtcgatgtacacgttcgtcacatctcatctacctcccggttttaatgaatacgattttgtaccagagtcctttgatcgtgacaaaacaattgcactgataatgaattcctctggatctactgggttacctaagggtgtggcccttccgcatagaactgcctgcgtcagattctcgcatgccagagatcctatttttggcaatcaaatcattccggatactgcgattttaagtgttgttccattccatcacggttttggaatgtttactacactcggatatttgatatgtggatttcgagtcgtcttaatgtatagatttgaagaagagctgtttttacgatcccttcaggattacaaaattcaaagtgcgttgctagtaccaaccctattttcattcttcgccaaaagcactctgattgacaaatacgatttatctaatttacacgaaattgcttctgggggcgcacctctttcgaaagaagtcggggaagcggttgcaaaacgcttccatcttccagggatacgacaaggatatgggctcactgagactacatcagctattctgattacacccgagggggatgataaaccgggcgcggtcggtaaagttgttccattttttgaagcgaaggttgtggatctggataccgggaaaacgctgggcgttaatcagagaggcgaattatgtgtcagaggacctatgattatgtccggttatgtaaacaatccggaagcgaccaacgccttgattgacaaggatggatggctacattctggagacatagcttactgggacgaagacgaacacttcttcatagttgaccgcttgaagtctttaattaaatacaaaggatatcaggtggcccccgctgaattggaatcgatattgttacaacaccccaacatcttcgacgcgggcgtggcaggtcttcccgacgatgacgccggtgaacttcccgccgccgttgttgttttggagcacggaaagacgatgacggaaaaagagatcgtggattacgtcgccagtcaagtaacaaccgcgaaaaagttgcgcggaggagttgtgtttgtggacgaagtaccgaaaggtcttaccggaaaactcgacgcaagaaaaatcagagagatcctcataaaggccaagaagggcggaaagtccaaattgtaa

SEQ ID NO: 123 - RNA, 1806 nt, synthetic construct
  source 1..1806: mol_type = other RNA; note = GUS mRNA
atgttacgtcctgtagaaaccccaacccgtgaaatcaaaaaactcgacggcctgtgggcattcagtctggatcgcgaaaactgtggaattgatcagcgttggtgggaaagcgcgttacaagaaagccgggcaattgctgtgccaggcagttttaacgatcagttcgccgatgcagatattcgtaattatgcgggcaacgtctggtatcagcgcgaagtctttataccgaaaggttgggcaggccagcgtatcgtgctgcgtttcgatgcggtcactcattacggcaaagtgtgggtcaataatcaggaagtgatggagcatcagggcggctatacgccatttgaagccgatgtcacgccgtatgttattgccgggaaaagtgtacgtatcaccgtttgtgtgaacaacgaactgaactggcagactatcccgccgggaatggtgattaccgacgaaaacggcaagaaaaagcagtcttacttccatgatttctttaactatgccggaatccatcgcagcgtaatgctctacaccacgccgaacacctgggtggacgatatcaccgtggtgacgcatgtcgcgcaagactgtaaccacgcgtctgttgactggcaggtggtggccaatggtgatgtcagcgttgaactgcgtgatgcggatcaacaggtggttgcaactggacaaggcactagcgggactttgcaagtggtgaatccgcacctctggcaaccgggtgaaggttatctctatgaactgtgcgtcacagccaaaagccagacagagtgtgatatctacccgcttcgcgtcggcatccggtcagtggcagtgaagggccaacagttcctgattaaccacaaaccgttctactttactggctttggtcgtcatgaagatgcggacttacgtggcaaaggattcgataacgtgctgatggtgcacgaccacgcattaatggactggattggggccaactcctaccgtacctcgcattacccttacgctgaagagatgctcgactgggcagatgaacatggcatcgtggtgattgatgaaactgctgctgtcggctttaacctctctttaggcattggtttcgaagcgggcaacaagccgaaagaactgtacagcgaagaggcagtcaacggggaaactcagcaagcgcacttacaggcgattaaagagctgatagcgcgtgacaaaaaccacccaagcgtggtgatgtggagtattgccaacgaaccggatacccgtccgcaagtgcacgggaatatttcgccactggcggaagcaacgcgtaaactcgacccgacgcgtccgatcacctgcgtcaatgtaatgttctgcgacgctcacaccgataccatcagcgatctctttgatgtgctgtgcctgaaccgttattacggatggtatgtccaaagcggcgatttggaaacggcagagaaggtactggaaaaagaacttctggcctggcaggagaaactgcatcagccgattatcatcaccgaatacggcgtggatacgttagccgggctgcactcaatgtacaccgacatgtggagtgaagagtatcagtgtgcatggctggatatgtatcaccgcgtctttgatcgcgtcagcgccgtcgtcggtgaacaggtatggaatttcgccgattttgcgacctcgcaaggcatattgcgcgttggcggtaacaagaaagggatcttcactcgcgaccgcaaaccgaagtcggcggcttttctgctgcaaaaacgctggactggcatgaacttcggtgaaaaaccgcagcagggaggcaaacaa

SEQ ID NO: 124 - RNA, 19 nt, synthetic construct
  source 1..19: mol_type = other RNA; note = k-ras siRNA (sense)
gtctcttggatattctcga

SEQ ID NO: 125 - RNA, 19 nt, synthetic construct
  source 1..19: mol_type = other RNA; note = k-ras siRNA (antisense)
tcgagaatatccaagagac

SEQ ID NO: 126 - RNA, 23 nt, synthetic construct
  source 1..23: mol_type = other RNA; note = c-myc miRNA (sense)
caaaaaccgcaattacttttgca

SEQ ID NO: 127 - RNA, 23 nt, synthetic construct
  source 1..23: mol_type = other RNA; note = c-myc miRNA (antisense)
tgcaaaagtaattgagatttttg

SEQ ID NO: 128 - DNA, 20 bp, synthetic construct
  source 1..20: mol_type = other DNA; note = Albumin (Forward)
ttttatgccccggaactcct

SEQ ID NO: 129 - DNA, 20 bp, synthetic construct
  source 1..20: mol_type = other DNA; note = Albumin (reverse)
ttggagactggcacacttga

SEQ ID NO: 130 - DNA, 22 bp, synthetic construct
  source 1..22: mol_type = other DNA; note = Cytokeratin 18 (Forward)
catagacaaggtacggttcctg

SEQ ID NO: 131 - DNA, 22 bp, synthetic construct
  source 1..22: mol_type = other DNA; note = Cytokeratin 18 (Reverse)
tgttgtccatgttgcttcgagc

SEQ ID NO: 132 - DNA, 19 bp, synthetic construct
  source 1..19: mol_type = other DNA; note = 28S (Forward)
ttgaaaatccgggggagag

SEQ ID NO: 133 - DNA, 20 bp, synthetic construct
  source 1..20: mol_type = other DNA; note = 28S(Reverse)
acattgttccaacatgccag

SEQ ID NO: 134 - RNA, 19 nt, synthetic construct
  source 1..19: mol_type = other RNA; note = TICAM-1 (sense)
agtcagaggtcacctcagg

SEQ ID NO: 135 - RNA, 19 nt, synthetic construct
  source 1..19: mol_type = other RNA; note = TICAM-1 (antisense)
cctgaggtgacctctgact

SEQ ID NO: 136 - RNA, 41 nt, synthetic construct
  source 1..41: mol_type = other RNA; note = PTEN siRNA1
gatcagcatacacaattatttaatttgtgtatgctgatctt

SEQ ID NO: 137 - RNA, 42 nt, synthetic construct
  source 1..42: mol_type = other RNA; note = PTEN siRNA2
acaaatgaagggatataaatttttatatcccttcatttgtgg

SEQ ID NO: 138 - RNA, 42 nt, synthetic construct
  source 1..42: mol_type = other RNA; note = CONTROL siRNA
ttctccgaacgtgtcacgtttacgtgacacgttcggagaatt

SEQ ID NO: 139 - RNA, 67 nt, synthetic construct
  source 1..67: mol_type = other RNA; note = aca-mir-17 MI0018772
atgtcaaagtgcttacagtgcaggtagtgataagtagaacctactgcagtgaaggcacttgtagcat

SEQ ID NO: 140 - RNA, 23 nt, synthetic construct
  source 1..23: mol_type = other RNA; note = aca-miR-17-5p MIMAT0021803
caaagtgcttacagtgcaggtag

SEQ ID NO: 141 - RNA, 22 nt, synthetic construct
  source 1..22: mol_type = other RNA; note = aca-miR-17-3p MIMAT0021804
actgcagtgaaggcacttgtag

SEQ ID NO: 142 - DNA, 6689 bp, Mus musculus
  source 1..6689: mol_type = unassigned DNA; note METASTASIS-ASSOCIATED-IN-LUNG-ADENOCARCINOMA-TRANSCRIPT-1 (MALAT-1)
aggcattcaggcagcgagagcagagcagcgtagagcagcacagctgagctcgtgaggcaggagactcagcccgaggaaatcgcagataagtttttaattaaaaagattgagcagtaaaaagaattagaactctaaacttaagctaatagagtagcttatgaaatattacttagtcttaataatctaagaagatcttaagagataacatgaaggcttatttaaacagtttgaaaaaggaaatgaggagaaaagtatttgtactgtataatggaggctgaccagagcagtttaggagattgtaaagggaggttttgtgaagttctaaaaggttctagtttgaaggtcggccttgtagattaaaacgaaggttacctaaatagaatctaagtggcatttaaaacagtaaagttgtagagaatagtttgaaaatgaggtgtagttttaaaagattgagaaaagtaggttaagttgacggccgttataaaaatccttcgactggcgcatgtacgtttgaaggcatgagttggaaacagggaagatggaagtgttaggctagccgggcgatggtggcgcacgcctttaatcctagcacttgggaggcagaggcaggcggatttctgagttcgaggccagcctggtctacagagtgagttccaggacagccagggctacacagagaaaccctgtcttgaaaaaacaaaaaggttaggctagtatttggagaaagaagattagaaaatggaagtgaaagacgaagaagacatacaggaaggtgaagaaaaagctgttagagaagataggaaaatagaagacaaagcatctttagaagacagaaaaggtacttaaaggcacaggtagtaggaagccgaagaatagaagatagaaagaagcaagatagaaaaacaaaatggaagttaagacaactttggatgccagcattcaagataggcaaagaagataagattgaggccaaaaggttggataagatataaagtcagaaggaaattatctttaaagccataagttcaaatttctgatggagcgagcagtttagaagagtctttagacagccacatacaagattgaagctagcaatcaaagctactaggactgaagtaaaaagttaaggcagaatgcctttgaagagttagaagaatattaaaagccttaacttgtagcttaattttgcttgatgacaaaaggacttttgataacagtttcaagattgtcagcattttgcattggacttgagctgaggtgcttttaaaatcctaacgactagcattggcagctgacccaggtctacacagaagtgcattcagtgaactaggaagacaggagcggcagacaggagtcccgaagccagtttggtgaagctaggaaggactgaggagccagcagcagcagtgcatggtgaagatagcccaggaaagagtgcggttcggtggaggaagctaggaagaaggagccatacggatgtggtggtgaagctgggaaagggttccaggatggtggagcgagagcgagttggtgatgaagctagctggcggcttggcttgtcaactgcgcggaggaggcgagcaggcattgtggagaggatagatagcggctcctagaccagcatgccagtgtgcaagaaaggctgcagggagagcatgcggtgcggtaacattccttgaggtcggcaacatggtggtggttttctgtaacttggatggtaacttgtttactttgtcttaatagttatgggggagttgtaggcttctgtgtaaagagatatatctggggctgtatgtaggcctttgcgggtgttgtaggtttttctttttcagggttatgtcctcttgcatcttgtcagaagcttttgagggctgactgccaaggcccagaaagaagaatggtagatggcaagttgtctttaaccgctcagaggggaatgaatggtagagccagcacaacctcccagttttgtaagacgttgtagtttgaacagatgacctaccacaagcctcactcctgtgtaggggaggtaattgggcaaagtgcttttgggggaatgggggcaaaatatattttgagttcttttccccttaggtctgtctagaatcctaaaggcagatgactcaagggaaccagaaaaaaggaaatccactctcaggataagcagagctcgccaggtttacagtttgtaggaagtagaggatggatgctagctttcacactgagtgtggaggagctggccatggcggaattgctggtagtttactctttccccctcccttaatgagatttgtaaaatcctaaacacttttacttgaaatatttgggagtggtcttaacagggaggagtgggtgggggaaacgttttttttctaagattttccacagatgctatagttgtgttgacacactgggttagagaaggcgtgtactgctatgctgttggcacgacaccttcagggactggagctgccttttgtccttggaagagttttcccagttgccgctgaagtcagcacagtgcggctttggttcacagtcacctcaggagaacctcaggagcttggctaggccagaggttgaagttaagttttacagcaccgtgatttaaaatatttcattaaaggggaggggtaaaacttagttggctgtggccttgtgtttgggtgggtgggggtgttaggtaattgtttagtttatgatttcagataatcataccagagaacttaaatatttggaaaaacaggaaatctcagctttcaagttggcaagtaactcccaatccagtttttgcttcttttttcctttttctttttttgaggcgggcagctaaggaaggttggttcctctgccggtccctcgaaagcgtagggcttgggggttggtctggtccactgggatgatgtgatgctacagtggggactcttctgaagctgttggatgaatatagattgtagtgtgtggttctcttttgaaatttttttcaggtgacttaatgtatcttaataactactataggaacaaaggaagtggctttaatgaccctgaaggaatttcttctggtgatagcttttatattatcaagtaagagatactatctcagttttgtataagcaagtctttttcctagtgtaggagaaatgattttccttgtgactaaacaagatgtaaaggtatgctttttttcttcttgtgcattgtatacttgtgtttatttgtaacttataatttaagaattatgataattcagcctgaatgtcttttagagggtgggcttttgttgatgagggaggggaaacctttttttttctgtagacctttttcagataacaccatctgagtcataaccagcctggcagtgtgatgacgtagatgcagagggagcagctccttggtgaatgagtgataagtaaaggcagaaaaaataatgtcatgtctccatggggaatgagcatgagccagagattgttcctactgatgaaaagctgcatatgcaaaaatttaagcaaatgaaagcaaccagtataaagttatggcaatacctttaaaagttatggcttatctaccaagctttatccacaaaagtaaagaattgatgaaaaacagtgaagatcaaatgttcatctcaaaactgcttttacaaaagcagaatagaaatgaagtgaaaatgctgcattaagcctggagtaaaaagaagctgagcttgttgagatgagtgggatcgagcggctgcgaggcggtgcagtgtgccaatgtttcgtttgcctcagacaggtttctcttcataagcagaagagttgcttcattccatctcggagcaggaaacagcagactgctgttgacagataagtgtaacttggatctgcagtattgcatgttagggatagataagtgccttttttctctttttccaaaaagacctgtagagctgttgaatgtttgcagctggcccctcttaggcagttcagaattttgagtagttttcccatccagcctcttaaaaattcctaagccttgcaccgatgggctttcatgatgggatagctaataggcttttgcatcgtaaacttcaacacaaaagcctacatgattaatgcctactttaattacattgcttacaagattaaggaatctttatcttgaagaccccatgaaagggatcattatgtgctgaaaattagatgttcatattgctaaaatttaaatgtgctccaatgtacttgtgcttaaaatcattaaattatacaaattaataaaatacttcactagagaatgtatgtatttagaaggctgtctccttatttaaataaagtcttgtttgttgtctgtagttagtgtgggcaattttggggggatgttcttctctaatcttttcagaaacttgacttcgaacacttaagtggaccagatcaggatttgagccagaagaccgaaattaactttaaggcaggaaagacaaattttattctccatgcagtgatgagcatttaataattgcaggcctggcatagaggccgtctaactaaggactaagtaccttaggcaggtgggagatgatggtcagagtaaaaggtaactacatattttgtttccagaaagtcaggggtctaatttgaccatggctaaacatctagggtaagacacttttcccccacatttccaaatatgcatgttgagtttaaatgcttacgatcatctcatccactttagccttttgtcacctcacttgagccacgagtggggtcaggcatgtgggtttaaagagttttcctttgcagagcctcatttcatccttcatggagctgctcaggactttgcatataagcgcttgcctctgtcttctgttctgctagtgagtgtgtgatgtgagaccttgcagtgagtttgtttttcctggaatgtggagggagggggggatggggcttacttgttctagctttttttttacagaccacacagaatgcaggtgtcttgacttcaggtcatgtctgttctttggcaagtaatatgtgcagtactgttccaatctgctgctattagaatgcattgtgacgcgactggagtatgattaaagaaagttgtgtttccccaagtgtttggagtagtggttgttggaggaaaagccatgagtaacaggctgagtgttgaggaaatggctctctgcagctttaagtaacccgtgtttgtgattggagccgagtccctttgctgtgctgccttaggtaaatgtttttgttcatttctggtgaggggggttgggagcactgaagcctttagtctcttccagattcaacttaaaatctgacaagaaataaatcagacaagcaacattcttgaagaaattttaactggcaagtggaaatgttttgaacagttccgtggtctttagtgcattatctttgtgtaggtgttctctctcccctcccttggtcttaattcttacatgcaggaacattgacaacagcagacatctatctattcaaggggccagagaatccagacccagtaaggaaaaatagcccatttactttaaatcgataagtgaagcagacatgccattttcagtgtggggattgggaagccctagttctttcagatgtacttcagactgtagaaggagcttccagttgaattgaaattcaccagtggacaaaatgaggacaacaggtgaacgagccttttcttgtttaagattagctactggtaatctagtgttgaatcctctccagcttcatgctggagcagctagcatgtgatgtaatgttggccttggggtggaggggtgaggtgggcgctaagcctttttttaagatttttcaggtacccctcactaaaggcactgaaggcttaatgtaggacagcggagccttcctgtgtggcaagaatcaagcaagcagtattgtatcgagaccaaagtggtatcatggtcggttttgattagcagtggggactaccctaccgtaacaccttgttggaattgaagcatccaaagaaaatacttgagaggccctgggcttgttttaacatctggaaaaaaggctgtttttatagcagcggttaccagcccaaacctcaagttgtgcttgcaggggagggaaaagggggaaagcgggcaaccagtttccccagcttttccagaatcctgttacaaggtctccccacaagtgatttctctgccacatcgccaccatgggcctttggcctaatcacagacccttcacccctcaccttgatgcagccagtagctggatccttgaggtcacgttgcatatcggtttcaaggtaaccatggtgccaaggtcctgtgggttgcaccagaaaaggccatcaattttccccttgcctgtaatttaacattaaaaccatagctaagatgttttatacatagcacctatgcagagtaaacaaaccagtatgggtatagtatgtttgataccagtgctgggtgggaatgtaggaagtcggatgaaaagcaagcctttgtaggaagttgttggggtgggattgcaaaaattctctgctaagactttttcaggtggacataacagacttggccaagctagcatcttagtggaagcagattcgtcagtagggttgtaaaggtttttcttttcctgagaaaacaaccttttgttttctcaggttttgctttttggcctttccctagctttaaaaaaaaaaaagcaaaa

SEQ ID NO: 143 - RNA, 1652 nt, Photinus pyralis
  source 1..1652: mol_type = mRNA; note = Luciferase mRNA
atggaggacgccaagaacatcaagaagggccccgcccccttctaccccctggaggacggcaccgccggcgagcagctgcacaaggccatgaagcggtacgccctggtgcccggcaccatcgccttcaccgacgcccacatcgaggtggacatcacctacgccgagtacttcgagatgagcgtgcggctggccgaggccatgaagcggtacggcctgaacaccaaccaccggatcgtggtgtgcagcgagaacagcctgcagttcttcatgcccgtgctgggcgccctgttcatcggcgtggccgtggcccccgccaacgacatctacaacgagcgggagctgctgaacagcatgggcatcagccagcccaccgtggtgttcgtgagcaagaagggcctgcagaagatcctgaacgtgcagaagaagctgcccatcatccagaagatcatcatcatggacagcaagaccgactaccagggcttccagagcatgtacaccttcgtgaccagccacctgccccccggcttcaacgagtacgacttcgtgcccgagagcttcgaccgggacaagaccatcgccctgatcatgaacagcagcggcagcaccggcctgcccaagggcgtggccctgccccaccggaccgcctgcgtgcggttcagccacgcccgggaccccatcttcggcaaccagatcatccccgacaccgccatcctgagcgtggtgcccttccaccacggcttcggcatgttcaccaccctgggctacctgatctgcggcttccgggtggtgctgatgtaccggttcgaggaggagctgttcctgcggagccgcaggactacaagatccagagcgccctgctggtgcccaccctgttcagcttcttcgccaagagcaccctgatcgacaagtacgacctgagcaacctgcacgagatcgccagcggcggcgcccccctgagcaaggaggtgggcgaggccgtggccaagcggttccacctgcccggcatccggcagggctacggcctgaccgagaccaccagcgccatcctgatcacccccgagggcgacgacaagcccggcgccgtgggcaaggtggtgcccttcttcgaggccaaggtggtggacctggacaccggcaagaccctgggcgtgaaccagcggggcgagctgtgcgtgcggggccccatgatcatgagcggctacgtgaacaaccccgaggccaccaacgccctgatcgacaaggacggctggctgcacagcggcgacatcgcctactgggacgaggacgagcacttcttcatcgtggaccggctgaagagcctgatcaagtacaagggctaccaggtggcccccgccgagctggagagcatcctgctgcagcaccccaacatcttcgacgccggcgtggccggcctgcccgacgacgacgccggcgagctgcccgccgccgtggtggtgctggagcacggcaagaccatgaccgagaaggagatcgtggactacgtggccagccaggtgaccaccgccaagaagctgcggggcggcgtggtgttcgtggacgaggtgcccaagggcctgaccggcaagctggacgcccggaagatccgggagatcctgatcaaggccaagaagggcggcaagatcgccgtgtga

SEQ ID NO: 144 - RNA, 1805 nt, synthetic construct
  source 1..1805: mol_type = other RNA; note = GABAB1a
atgttacgtcctgtagaaaccccaacccgtgaaatcaaaaaactcgacggcctgtgggcattcagtctggatcgcgaaaactgtggaattgatcagcgttggtgggaaagcgcgttacaagaaagccgggcaattgctgtgccaggcagttttaacgatcagttcgccgatgcagatattcgtaattatgcgggcaacgtctggtatcagcgcgaagtctttataccgaaaggttgggcaggccagcgtatcgtgctgcgtttcgatgcggtcactcattacggcaaagtgtgggtcaataatcaggaagtgatggagcatcagggcggctatacgccatttgaagccgatgtcacgccgtatgttattgccgggaaaagtgtacgtatcaccgtttgtgtgaacaacgaactgaactggcagactatcccgccgggaatggtgattaccgacgaaaacggcaagaaaaagcagtcttacttccatgatttctttaactatgccggaatccatcgcagcgtaatgctctacaccacgccgaacacctgggtggacgatatcaccgtggtgacgcatgtcgcgcaagactgtaaccacgcgtctgttgactggcaggtggtggccaatggtgatgtcagcgttgaactgcgtgatgcggatcaacaggtggttgcaactggacaaggcactagcgggactttgcaagtggtgaatccgcacctctggcaaccgggtgaaggttatctctatgaactgtgcgtcacagccaaaagccagacagagtgtgatatctacccgcttcgcgtcggcatccggtcagtggcagtgaagggccaacagttcctgattaaccacaaaccgttctactttactggctttggtcgtcatgaagatgcggacttacgtggcaaaggattcgataacgtgctgatggtgcacgaccacgcattaatggactggattggggccaactcctaccgtacctcgcattacccttacgctgaagagatgctcgactgggcagatgaacatggcatcgtggtgattgatgaaactgctgctgtcggctttaacctctctttaggcattggtttcgaagcgggcaacaagccgaaagaactgtacagcgaagaggcagtcaacggggaaactcagcaagcgcacttacaggcgattaaagagctgatagcgcgtgacaaaaaccacccaagcgtggtgatgtggagtattgccaacgaaccggatacccgtccgcaagtgcacgggaatatttcgccactggcggaagcaacgcgtaaactcgacccgacgcgtccgatcacctgcgtcaatgtaatgttctgcgacgctcacaccgataccatcagcgatctctttgatgtgctgtgcctgaaccgttattacggatggtatgtccaaagcggcgatttggaaacggcagagaaggtactggaaaaagaacttctggcctggcaggagaaactgcatcagccgattatcatcaccgaatacggcgtggatacgttagccgggctgcactcaatgtacaccgacatgtggagtgaagagtatcagtgtgcatggctggatatgtatcaccgcgtctttgatcgcgtcagcgccgtcgtcggtgaacaggtatggaatttcgccgattttgcgacctcgcaaggcatattgcgcgttggggtaacaagaaagggatcttcactcgcgaccgcaaaccgaagtcggcggcttttctgctgcaaaaacgctggactggcatgaacttcggtgaaaaaccgcagcagggaggcaaacaa

SEQ ID NO: 145 - RNA, 420 nt, Mus musculus
  source 1..420: mol_type = other RNA; note = GABAB1a siRNA
aaaaagggagcgagcaaacaagaccagagtgccaatgaaaagaacagactggagtgaacaaagtccaagttgatgcccacggcaatattctcctcagcaccctggaaatcaggaacgagaccagtggctccgaggtgctcacaggtgtaagtgaccccaaggccaccatgtactcgtacgacagcgccagcatccagtaccgcaagccactgagcagccgcgagggcttcgggcgtgggctggacaggcacggggtaccgggcaaggggcgcatccgcaggcgcgcctcgcagctcaaagtgaagatccccgacttgactgacgtgaactccatagacaagtggtcccgaatgttcttccccatcaccttttctctttttaatgtcgtttattggctttactatgtacactaaggtcagt

SEQ ID NO: 146 - protein, 239 aa, Human betaherpesvirus 5
  source 1..239: note = GFP protein
MVSKGEELFTGVVPILVELDGDVNGHKFSVSGEGEGDATYGKLTLKFICTTGKLPVPWPTLVTTLTYGVQCFSRYPDHMKQHDFFKSAMPEGYVQERTIFFKDDGNYKTRAEVKFEGDTLVNRIELKGIDFKEDGNILGHKLEYNYNSHNVYIMADKQKNGIKVNFKIRHNIEDGSVQLADHYQQNTPIGDGPVLLPDNHYLSTQSALSKDPNEKRDHMVLLEFVTAAGITLGMDELYK

SEQ ID NO: 147 - RNA, 720 nt, synthetic construct; identical to SEQ ID NO: 121
  source 1..720: mol_type = other RNA; note = eGFP mRNA Open Reading Frame

SEQ ID NO: 148 - protein, 550 aa, Photinus pyralis
  source 1..550: note = Eukaryotic Luciferase
MEDAKNIKKGPAPFYPLEDGTAGEQLHKAMKRYALVPGTIAFTDAHIEVNITYAEYFEMSVRLAEAMKRYGLNTNHRIVVCSENSLQFFMPVLGALFIGVAVAPANDIYNERELLNSMNISQPTVVFVSKKGLQKILNVQKKLPIIQKIIIMDSKTDYQGFQSMYTFVTSHLPPGFNEYDFVPESFDRDKTIALIMNSSGSTGSPKGVALPHRTACVRFSHARDPIFGNQIIPDTAILSVVPFHHGFGMFTTLGYLICGFRVVLMYRFEEELFLRSLQDYKIQSALLVPTLFSFFAKSTLIDKYDLSNLHEIASGGAPLSKEVGEAVAKRFHLPGIRQGYGLTETTSAILITPEGDDKPGAVGKVVPFFEAKVVDLDTGKTLGVNQRGELCVRGPMIMSGYVNDPEATNALIDKDGWLHSGDIAYWDEDEHFFIVDRLKSLIKYKGCQVAPAELESILLQHPNIFDAGVAGLPGDDAGELPAAVVVLEHGKTMTEKEIVDYVASQVTTAKKLRGGVVFVDEVPKGLTGKLDARKIREILIKAKKGGKSKL

SEQ ID NO: 149 - protein, 527 aa, Bos taurus
  source 1..527: note = catalase
MADNRDPASDQMKHWKEQRAAQKPDVLTTGGGNPVGDKLNSLTVGPRGPLLVQDVVFTDEMAHFDRERIPERVVHAKGAGAFGYFEVTHDITRYSKAKVFEHIGKRTPIAVRFSTVAGESGSADTVRDPRGFAVKFYTEDGNWDLVGNNTPIFFIRDALLFPSFIHSQKRNPQTHLKDPDMVWDFWSLRPESLHQVSFLFSDRGIPDGHRHMNGYGSHTFKLVNANGEAVYCKFHYKTDQGIKNLSVEDAARLAHEDPDYGLRDLFNAIATGNYPSWTLYIQVMTFSEAEIFPFNPFDLTKVWPHGDYPLIPVGKLVLNRNPVNYFAEVEQLAFDPSNMPPGIEPSPDKMLQGRLFAYPDTHRHRLGPNYLQIPVNCPYRARVANYQRDGPMCMMDNQGGAPNYYPNSFSAPEHQPSALEHRTHFSGDVQRFNSANDDNVTQVRTFYLKVLNEEQRKRLCENIAGHLKDAQLFIQKKAVKNFSDVHPEYGSRIQALLDKYNEEKPKNAVHTYVQHGSHLSAREKANL

SEQ ID NO: 150 - DNA, 19 bp, synthetic construct
  source 1..19: mol_type = other DNA; note = GAPDH (Forward)
atggggaaggtgaaggtcg

SEQ ID NO: 151 - DNA, 22 bp, synthetic construct
  source 1..22: mol_type = other DNA; note = GAPDH (Reverse)
gggtcattgatggcaacaatat

SEQ ID NO: 152 - DNA, 20 bp, synthetic construct
  source 1..20: mol_type = other DNA; note = PD-L1 (Forward)
tcacggttcccaaggaccta

SEQ ID NO: 153 - DNA, 20 bp, synthetic construct
  source 1..20: mol_type = other DNA; note = PD-L1 (Reverse)
aggtcttcctctccatgcac

SEQ ID NO: 154 - DNA, 21 bp, synthetic construct
  source 1..21: mol_type = other DNA; note = IL-6 (Forward)
ggtacatcctcgacggcatct

SEQ ID NO: 155 - DNA, 21 bp, synthetic construct
  source 1..21: mol_type = other DNA; note = IL-6 (Reverse)
gtgcctctttgctgctttcac

SEQ ID NO: 156 - DNA, 21 bp, synthetic construct
  source 1..21: mol_type = other DNA; note = IL-1 beta (Forward)
acagatgaagtgctccttcca

SEQ ID NO: 157 - DNA, 21 bp, synthetic construct
  source 1..21: mol_type = other DNA; note = IL-1 beta (Reverse)
gtcggagattcgtagctggat

SEQ ID NO: 158 - DNA, 23 bp, synthetic construct
  source 1..23: mol_type = other DNA; note = TNF-alpha (Forward)
ccaggcagtcagatcatcttctc

SEQ ID NO: 159 - DNA, 23 bp, synthetic construct
  source 1..23: mol_type = other DNA; note = TNF-alpha (Reverse)
agctggttatctctcagctccac

SEQ ID NO: 160 - protein, 104 aa, Escherichia coli
  REGION 1..104: note = heat-labile enterotoxin B subunit
MAPQSITELCSEYRNTQIYTINDKILSYTESMAGKREMVIITFKSGATFQVEVPGSQHIDSQKKAIERMKDTLRITYLTETKIDKLCVWNNKTPNSIAAISMEN

SEQ ID NO: 161 - protein, 106 aa, Vibrio cholerae
  REGION 1..106: note = Cholera toxin B (CTB) subunit
MTPQNITDLCAEYHNTQIYTLNDKIFSYTESLAGKREMAIITFKNGAIFQVEVPGSQHIDSQKKAIERMKDTLRIAYLTEAKVEKLCVWNNKTPHAIAAISMANGT

SEQ ID NO: 162 - protein, 478 aa, Yersinia pestis
  REGION 1..478: note = extracellular capsule protein F1/immune-modulator V fusion protein
MADLTASTTATATLVEPARITLTYKEGAPITIMDNGNIDTELLVGTLTLGGYKTGTTSTSVNFTDAAGDPMYLTFTSQDGNNHQFTTKVIGKDSRDFDISPKVNGENLVGDDVVLATGSQDFFVRSIGSKGGKLAAGKYTDAVTVTVSNQEFMIRAYEQNPQHFIEDLEKVRVEQLTGHGSSVLEELVQLVKDKNIDISIKYDPRKDSEVFANRVITDDIELLKKILAYFLPEDAILKGGHYDNQLQNGIKRVKEFLESSPNTQWELRAFMAVMHFSLTADRIDDDILKVIVDSMNHHGDARSKLREELAELTAELKIYSVIQAEINKHLSSSGTINIHDKSINLMDKNLYGYTDEEIFKASAEYKILEKMPQTTIQVDGSEKKIVSIKDFLGSENKRTGALGNLKNSYSYNKDNNELSHFATTCSDKSRPLNDLVSQKTTQLSDITSRFNSAIEALNRFIQKYDSVMQRLLDDTSGK

SEQ ID NO: 163 - protein, 663 aa, Shigella flexneri
  REGION 1..663: note = Outer membrane protein receptor for ferrichrome
MARSKTAQPKHSLRKIAVVVATAVSGMSVYAAAVEPKEDTITVTAAPAPQESAWGPAATIAARQSATGTKTDTPIQKVPQSISVVTAEEMALHQPKSVKEALSYTPGVSVGTRGASNTYDHLIIRGFAAEGQSQNNYLNGLKLQGNFYNDAVIDPYMLERAEIMRGPVSVLYGKSSPGGLLNMVSKRPTTEPLKEVQFKAGTDSLFQTGFDFSDALDDDGVYSYRLTGLARSANAQQKGSEEQRYAIAPAFTWRPDDKTNFTFLSYFQNEPETGYYGWLPKEGTVEPLPNGKRLPTDFNEGAKNNTYSRNEKMVGYSFDHEFNDTFTVRQNLRFAENKTSQNSVYGYGVCSDPANAYSKQCAALAPADKGHYLARKYVVDDEKLQNFSVDTQLQSKFATGDIDHTLLTGVDFMRMRNDINAWFGYDDSVPLFNLYNPVNPDFDFNAKDPANSGPYRILNKQKQTGVYVQDQAQWDKVLVTLGGRYDWADQESLNRVAGTTDKRDDKQFTWRGGVNYLFDNGVTPYFSYSESFEPSSQVGKDGNIFAPSKGKQYEVGVKYVPEDRPIVVTGAVYNLTKTNNLMADPEGSFFSVEGGEIRARGVEIEAKAALSASVNVVGSYTYTDAEYTTDTTYKGNTPAQVPKHMASLWADYTFFDGPLSGLT

SEQ ID NO: 164 - protein, 350 aa, Pseudomonas aeruginosa
  REGION 1..350: note = Outer membrane protein OprF
MKLKNTLGVVIGSLVAASAMNAFAQGQNSVEIEAFGKRYFTDSVRNMKNADLYGGSIGYFLTDDVELALSYGEYHDVRGTYETGNKKVHGNLTSLDAIYHFGTPGVGLRPYVSAGLAHQNITNINSDSQGRQQMTMANIGAGLKYYFTENFFAKASLDGQYGLEKRDNGHQGEWMAGLGVGFNFGGSKAAPAPEPVADVCSDSDNDGVCDNVDKCPDTPANVTVDANGCPAVAEVVRVQLDVKFDFDKSKVKENSYADIKNLADFMKQYPSTSTTVEGHTDSVGTDAYNQKLSERRANAVRDVLVNEYGVEGGRVNAVGYGESRPVADNATAEGRAINRRVEAEVEAEAK

SEQ ID NO: 165 - protein, 416 aa, Staphylococcus aureus
  REGION 1..416: note = N-terminal portion of the Candida albicans agglutinin-like protein 3 (Als3p)
AKTITGVFNSFNSLTWSNAATYNYKGPGTPTWNAVLGWSLDGTSASPGDTFTLNMPCVFKFTTSQTSVDLTAHGVKYATCQFQAGEEFMTFSTLTCTVSNTLTPSIKALGTVTLPLAFNVGGTGSSVDLEDSKCFTAGTNTVTFNDGGKKISINVDFERSNVDPKGYLTDSRVIPSLNKVSTLFVAPQCANGYTSGTMGFANTYGDVQIDCSNIHVGITKGLNDWNYPVSSESFSYTKTCSSNGIFITYKNVPAGYRPFVDAYISATDVNSYTLSYANEYTCAGGYWQRAPFTLRWTGYRNSDAGSNGIVIVATTRTVTDSTTAVTTLPFDPNRDKTKTIEILKPIPTTTITTSYVGVTTSYSTKTAPIGETATVIVDIPYHTTTTVTSKWTGTITSTTTHTNPTDSIDTVIVQVP

SEQ ID NO: 166 - protein, 239 aa, Salmonella enterica
  REGION 1..239: note = 27-kDa outer membrane protein (T2544)
  source 1..239: note = serovar Typhi
MKNFFAVCIIPLVVTWSATASAKEGIYITGKAGTSVVNVYGINSTFSQEEIVNGHATLPDRTKGVFGGGVAIGYDFYDPFQLPVRLELDTTFRGETDAKGGQDIIAFGQPVHINVKNQVRMTTYIVNGYYDFHNSTAFTPYISAGVGLAHVKLSNNTIPVGFGINETLSASKNNFAWGAGIGAKYAVTDNIMIDASYKYINAGKVSISKNHYAGDEHTAYDADTKAASNDFMLGITYAF

SEQ ID NO: 167 - protein, 226 aa, Hepacivirus B
  REGION 1..226: note = Hepatitis B surface antigen (HBsAg)
MENTTSGFLGPLLVLQAGFFLLTRILTIPQSLDSWWTSLNFQGGAPTCPGQNSQSPTSNHSPTSCPPICPGYRWMCLRRFIIFLFILLLCLIFLLVLLDYQGMLPVCPLLPGTSTTGTGPCRTCTIPAQGTSMFPSCCCTKPSDGNCTCIPIPSSWAFARFLWEWASVRFSWLSLLVPFVQWFAGLSPTVWLSVIWMMWYRGPSLYNTLSPFLPLLPISFCLWVYI

SEQ ID NO: 168 - protein, 177 aa, Hepacivirus C
  REGION 1..177: note = E1-E2 genome polyprotein
  source 1..177: note = genotype 1a
PTVALVTAQLLRIPQAILDMIAGAHWGVLAGIAYFSMVGNWAKVLVVLLLFAGVDAETYTTGGNAGRVTARLTGLFSPGAKQKIQLVNTNGSWHINSTALNCDDSLNTGWVAGLFYHHKFDSSGCPERLASCRPLADFAQGWGPISHASGSGPDQRPYCWHYPPKPCGIVPAKSVCG

SEQ ID NO: 169 - protein, 113 aa, Rotavirus A
  REGION 1..113: note = Inner capsid protein VP6
FNPIILRPNNVEVEFLLNGQIINTYQARFGTIVARNFDTIRLSFQLMRPPNMTPAVNALFPQAQPFQHHATVGLTLRIESAVCESVLADANETLLANVTAVRQEYAIPVGPVF

SEQ ID NO: 170 - protein, 326 aa, Rotavirus A
  REGION 1..326: note = Outer capsid glycoprotein VP7
MYGIEYTTVLTFLISFILLNYILKSLTRMMDFVIYRFLFVIVVLSPLLKAQNYGINLPITGSMDTAYANSTQEETFLTSTLCLYYPTEAATEINDNSWKDTLSQLFLTKGWPTGSIYFREYTDIVSFSVDPQLYCDYNVVLMKYDAALQLDMSELADLILNEWLCNPMDITLYYYQQTDEANKWISMGSSCTIKVCPLNTQTLGIGCLTTDTATFEEVATAEKLVITDVVDGVNHKLDVTTATCTIRNCKKLGPRENVAVIQVGGSDVLDITADPTTAPQTERMMRINWKKWWQVFYTVVDYVNQIIQLMSKRSRSLNSAAFYYRV

SEQ ID NO: 171 - protein, 92 aa, Norwalk virus
  REGION 1..92: note = Capsid protein
MKMASNDAAPSNDGAAGLVPEINNEAMALEPVAGAIAAPLTGQQNIIDPWIMNNFVQAPGGEFTVSPRNSPGEVLLNLELGPEINPYLAHLA

SEQ ID NO: 172 - protein, 700 aa, Severe acute respiratory syndrome-related coronavirus
  REGION 1..700: note = spike protein S1 fragment
SDLDRCTTFDDVQAPNYTQHTSSMRGVYYPDEIFRSDTLYLTQDLFLPFYSNVTGFHTINHTFGNPVIPFKDGIYFAATEKSNVVRGWVFGSTMNNKSQSVIIINNSTNVVIRACNFELCDNPFFAVSKPMGTQTHTMIFDNAFNCTFEYISDAFSLDVSEKSGNFKHLREFVFKNKDGFLYVYKGYQPIDVVRDLPSGFNTLKPIFKLPLGINITNFRAILTAFSPAQDIWGTSAAAYFVGYLKPTTFMLKYDENGTITDAVDCSQNPLAELKCSVKSFEIDKGIYQTSNFRVVPSGDVVRFPNITNLCPFGEVFNATKFPSVYAWERKKISNCVADYSVLYNSTFFSTFKCYGVSATKLNDLCFSNVYADSFVVKGDDVRQIAPGQTGVIADYNYKLPDDFMGCVLAWNTRNIDATSTGNYNYKYRYLRHGKLRPFERDISNVPFSPDGKPCTPPALNCYWPLNDYGFYTTTGIGYQPYRVVVLSFELLNAPATVCGPKLSTDLIKNQCVNFNFNGLTGTGVLTPSSKRFQPFQQFGRDVSDFTDSVRDPKTSEILDISPCSFGGVSVITPGTNASSEVAVLYQDVNCTDVSTAIHADQLTPAWRIYSTGNNVFQTQAGCLIGAEHVDTSYECDIPIGAGICASYHTVSLLRSTSQKSIVAYTMSLGADSSIAYSNNTIAIPTNFSISITTEVMPVSM

SEQ ID NO: 173 - protein, 255 aa, Vaccinia virus
  REGION 1..255: note = B5R antigenic ectodomain
TCTVPTMNNAKLTSTETSFNDKQKVTFTCDQGYHSSDPNAVCETDKWKYENPCKKMCTVSDYISELYNKPLYEVNSTMTLSCNGETKYFRCEEKNGNTSWNDTVTCPNAECQPLQLEHGSCQPVKEKYSFGEYMTINCDVGYEVIGASYISCTANSWNVIPSCQQKCDMPSLSNGLISGSTFSIGGVIHLSCKSGFTLTGSPSSTCIDGKWNPVLPICVRTNEEFDPVDDGPDDETDLSKLSKDVVQYEQEIESL

SEQ ID NO: 174 - protein, 499 aa, Japanese encephalitis virus
  REGION 1..499: note = envelope protein (E)
FNCLGMGNRDFIEGASGATWVDLVLEGDSCLTIMADKPTLDVRMINIEASQLAEVRSYCYHASVTDISTVARCPTTGEAHNEKRADSSYVCKQGFTDRGWGNGCGLFGKGSIDTCAKFSCTSKAIGRTIQPENIKYEVGIFVHGTTTSENHGNYSAQVGASQAAKFTVTPNAPSITLKLGDYGEVTLDCEPRSGLNTEAFYVMTVGSKSFLVHREWFHDLALPWTSPSSTAWRNRELLMEFEGAHATKQSVVALGSQEGGLHQALAGAIVVEYSSSVKLTSGHLKCRLKMDKLALKGTTYGMCTEKFSFAKNPVDTGHGTVVIELSYSGSDGPCKIPIVSVASLNDMTPVGRLVTVNPFVATSSANSKVLVEMEPPFGDSYIVVGRGDKQINHHWHKAGSTLGKAFSTTLKGAQRLAALGDTAWDFGSIGGVFNSIGRAVHQVFGGAFRTLFGGMSWITQGLMGALLLWMGVNARDRSIALAFLATGGVLVFLATNVHA

SEQ ID NO: 175 - protein, 20 aa, unidentified
  PEPTIDE 1..20: note = Antigenic peptide
  source 1..20: note = Coxsackeivirus 16 (CA16) VP4N20 antigenic peptide
GSQVSTQRSGSHENSNSASE

SEQ ID NO: 176 - protein, 20 aa, Enterovirus A
  REGION 1..20: note = VP4N20 antigenic peptide
  source 1..20: note = Enterovirus 71 VP4N20 antigenic peptide
GSQVSTQRSGSHENSNSASE

SEQ ID NO: 177 - protein, 472 aa, Human papillomavirus
  PEPTIDE 1..472: note = minor capsid protein L
  source 1..472: note = Human papillomavirus type 16 (HPV-16)
MRHKRSAKRTKRASATQLYKTCKQAGTCPPDIIPKEGKTIAEQILQYGSMGVFFGGLGIGTGSGTGGRTGYIPLGTRPPTATDTLAPVRPPLTVDPVGPSDPSIVSLVEETSFIDAGAPTSVPSIPPDVSGFSITTSTDTTPAILDINNTVTTVTTHNNPTFTDPSVLQPPTPAETGGHFTLSSSTISTHNYEEIPMDTFIVSTNPNTVTSSTPIPGSRPVARLGLYSRTTQQVKVVDPAFVTTPTKLITYDNPAYEGIDVDNTLYFSSNDNSINIAPDPDFLDIVALHRPALTSRRTGIRYSRIGNKQTLRTRSGKSIGAKVHYYYDLSTIDPAEEIELQTITPSTYTTTSHAASPTSINNGLYDIYADDFITDTSTTPVPSVPSTSLSGYIPANTTIPFGGAYNIPLVSGPDIPINITDQAPSLIPIVPGSPQYTIIADAGDFYLHPSYYMLRKRRKRLPYFFSDVSLAA

SEQ ID NO: 178 - protein, 394 aa, Human alphaherpesvirus 1
  REGION 1..394: note = Envelope glycoprotein D
MGGAAARLGAVILFVVIVGLHGVRSKYALVDASLKMADPNRFRGKDLPVLDQLTDPPGVRRVYHIQAGLPDPFQPPSLPITVYYAVLERACRSVLLNAPSEAPQIVRGASEDVRKQPYNLTIAWFRMGGNCAIPITVMEYTECSYNKSLGACPIRTQPRWNYYDSFSAVSEDNLGFLMHAPAFETAGTYLRLVKINDWTEITQFILEHRAKGSCKYALPLRIPPSACLSPQAYQQGVTVDSIGMLPRFIPENQRTVAVYSLKIAGWHGPKAPYTSTLLPPELSETPNATQPELAPEDPEDSALLEDPVGTVAPQIPPNWHIPSIQDAATPYHPPATPNNMGLIAGAVGGSLLAALVICGIVYWMRRHTQKAPKRIRLPHIREDDQPSSHQPLFY

SEQ ID NO: 179 - protein, 154 aa, Zika virus
  REGION 1..154: note = envelope domain III protein
GVSYSLCTAAFTFTKIPAETLHGTVTVEVQYAGTDGPCKVPAQMAVDMQTLTPVGRLITANPVITESTENSKMMLELDPPFGDSYIVIGVGEKKITHHWHRSGSTIGKAFEATVRGAKRMAVLGDTAWDFGSVGGALNSLGKGIHQIFGAAFKS

SEQ ID NO: 180 - protein, 298 aa, unidentified
  REGION 1..298: note = Major surface glycoprotein G
  source 1..298: note = Human respiratory syncytial virus A (RSV strain A)
MSKNKDQRTAKTLERTWDTLNHLLFISSCLYKLNLKSVAQITLSILAMIISTSLIIAAIIFIASANHKVTPTTAIIQDATSQIKNTTPTYLTQNPQLGISPSNPSEITSQITTILASTTPGVKSTLQSTTVKTKNTTTTQTQPSKPTTKQRQNKPPSKPNNDFHFEVFNFVPCSICSNNPTCWAICKRIPNKKPGKKTTTKPTKKPTLKTTKKDPKPQTTKSKEVPTTKPTEEPTINTTKTNIITTLLTSNTTGNPELTSQMETFHSTSSEGNPSPSQVSTTSEYPSQPSSPPNTPRQ

SEQ ID NO: 181 - protein, 122 aa, Dengue virus
  REGION 1..122: note = domain III fragment of dengue 2 envelope protein (D2EIII)
  source 1..122: note = Type 2
YSMCTGKFKVVKEIAETQHGTIVIRVQYEGDGSPCKIPFEIMDLEKRHVLGRLITVNPIVTEKDSPVNIEAEPPFGDSYIIIGVEPGQLKLSWFKKGSSIGQMFETTMRGAKRMAILGDTAW

SEQ ID NO: 182 - protein, 272 aa, unidentified
  REGION 1..272: note = Merozoite surface protein 4 (MSP4)
  source 1..272: note = Plasmodium falciparum Merozoite surface protein 4 (MSP4)
MWIVKFLIVVHFFIICTINFDKLYISYSYNIVPENGRMLNMRILGEEKPNVDGVSTSNTPGGNESSSASPNLSDAAEKKDEKEASEQGEESHKKENSQESANGKDDVKEEKKTNEKKDDGKTDKVQEKVLEKSPKESQMVDDKKKTEAIPKKVVQPSSSNSGGHVGEEEDHNEGEGEHEEEEEHEEDDDDEDDDTYNKDDLEDEDLCKHNNGGCGDDKLCEYVGNRRVKCKCKEGYKLEGIECVELLSLASSSLNLIFNSFITIFVVILLIN

SEQ ID NO: 183 - protein, 272 aa, unidentified
  REGION 1..272: note = Merozoite surface protein 5 (MSP5)
  source 1..272: note = Plasmodium falciparum Merozoite surface protein 5 (MSP5)
MNILCILSYIYFLVIFYSLNLNNKNENFLVVRRLMNDEKGEGGFTSKNKENGNNNRNNENELKEEGSLPTKMNEKNSNSSDKQPNDISHDESKSNSNNSQNIQKEPEEKENSNPNLDSSENSSESATRSVDISEHNSNNPETKEENGEEPLDLEINENAEIGQEPPNRLHFDNVDDEVPHYSALRYNKVEKNVTDEMLLYNMMSDQNRKSCAINNGGCSDDQICININNIGVKCICKDGYLLGTKCIILNSYSCHPFFSILIYITLFLLLFV

SEQ ID NO: 184 - protein, 642 aa, unidentified
  REGION 1..642: note = Trans-sialidase
  source 1..642: note = Trypanosoma cruzi Trans-sialidase
MLAPGSSRVELFKRQSSKVPFEKDGKVTERVVHSFRLPALVNVDGVMVAIADARYETSNDNSLIDTVAKYSVDDGETWETQIAIKNSRASSVSRVVDPTVIVKGNKLYVLVGSYNSSRSYWTSHGDARDWDILLAVGEVTKSTAGGKITASIKWGSPVSLKEFFPAEMEGMHTNQFLGGAGVAIVASNGNLVYPVQVTNKKKQVFSKIFYSEDEGKTWKFGKGRSAFGCSEPVALEWEGKLIINTRVDYRRRLVYESSDMGNSWLEAVGTLSRVWGPSPKSNQPGSQSSFTAVTIEGMRVMLFTHPLNFKGRWLRDRLNLWLTDNQRIYNVGQVSIGDENSAYSSVLYKDDKLYCLHEINSNEVYSLVFARLVGELRIIKSVLQSWKNWDSHLSSICTPADPAASSSERGCGPAVTTVGLVGFLSHSATKTEWEDAYRCVNASTANAERVPNGLKFAGVGGGALWPVSQQGQNQRYRFANHAFTVVASVTIHEVPSVASPLLGASLDSSGGKKLLGLSYDERHQWQPIYGSTPVTPTGSWEMGKRYHVVLTMANKIGSEYIDGEPLEGSGQTVVPDERTPDISHFYVGGYKRSDMPTISHVTVNNVLLYNRQLNAEEIRTLFLSQDLIGTEAHMDSSSDTSA

SEQ ID NO: 185 - protein, 487 aa, unidentified
  REGION 1..487: note = A2 protein
  source 1..487: note = Leishmania infantum A2 protein
MKIRSVRPLVVLLVCVAAVLALSASAEPHKAAVDVGPLSVDVGPLSVGPQSVGPLSVGPQSVGPLSVDVGPLSVGPQSVGPLSVDVGPLSVGPQSVGPLSVGPQAVGPLSVGPQSVGPLSVDVGPQAVGPQSVGPLSVGPQSVGPLSVGPQSVGPLSVGPLSVGPQSVGSLSVGPQSVGPLSVGPLSVDVGPQAVGPLSVGPQAVGPLSVGPQSVGPLSVGPQSVGPLSVGPQSVGPLSVGPQSVGPLSVGPQSVGPLSVDVGPQSVGPLSVGPQSVGPLSVGPQSVGPLSVGPQSVGPLSVGPQSVGPLSVGPQSVGPLSVGPQAVGPLSVDVGPQSVGPLSVGPQAVGPLSVGPQSVGPLSVGPQSVGPLSVDVGQQSVGPLSVGPQSVGPLSVGPQSVGPLSVGPQAVGPLSVGPQAVGPLSVGPQAVGPLSVGPQSVGPLSVGPQAVGPLSVGPQAVGPLSVGPQSVGPLSVGLQAVDVSPVS

SEQ ID NO: 186 - protein, 416 aa, Candida albicans; identical to SEQ ID NO: 165
  REGION 1..416: note = N-terminal portion of the Candida albicans agglutinin-like protein 3 (Als3p)

SEQ ID NO: 187 - protein, 385 aa, synthetic construct
  REGION 1..385: note = Ovalbumin
GSIGAASMEFCFDVFKELKVHHANENIFYCPIAIMSALAMVYLGAKDSTRTQINKVVRFDKLPGFGDSIEAQCGTSVNVHSSLRDILNQITKPNDVYSFSLASRLYAEERYPILPEYLQCVKELYRGGLEPINFQTAADQARELINSWVESQTNGIIRNVLQPSSVDSQTAMVLVNAIVFKGLWEKTFKDEDTQAMPFRVTEQESKPVQMMYQIGLFRVASMASEKMKILELPFASGTMSMLVLLPDEVSGLEQLESIINFEKLTEWTSSNVMEERKIKVYLPRMKMEEKYNLTSVLMAMGITDVFSSSANLSGISSAESLKISQAVHAAHAEINEAGREVVGSAEAGVDAASVSEEFRADHPFLFCIKHIATNAVLFFGRCVSP

SEQ ID NO: 188 - RNA, 1161 nt, synthetic construct
  misc_feature 1..1161: note = Ovalbumin ORF
  source 1..1161: mol_type = other RNA
atgggcagcatcggcgccgccagcatggagttctgcttcgacgtgttcaaggagctgaaggtgcaccacgccaacgagaacatcttctactgccccatcgccatcatgagcgccctggccatggtgtacctgggcgccaaggacagcacccggacccagatcaacaaggtggtgcggttcgacaagctgcccggcttcggcgacagcatcgaggcccagtgcggcaccagcgtgaacgtgcacagcagcctgcgggacatcctgaaccagatcaccaagcccaacgacgtgtacagcttcagcctggccagccggctgtacgccgaggagcggtaccccatcctgcccgagtacctgcagtgcgtgaaggagctgtaccggggcggcctggagcccatcaacttccagaccgccgccgaccaggcccgggagctgatcaacagctgggtggagagccagaccaacggcatcatccggaacgtgctgcagcccagcagcgtggacagccagaccgccatggtgctggtgaacgccatcgtgttcaagggcctgtgggagaagaccttcaaggacgaggacacccaggccatgcccttccgggtgaccgagcaggagagcaagcccgtgcagatgatgtaccagatcggcctgttccgggtggccagcatggccagcgagaagatgaagatcctggagctgcccttcgccagcggcaccatgagcatgctggtgctgctgcccgacgaggtgagcggcctggagcagctggagagcatcatcaacttcgagaagctgaccgagtggaccagcagcaacgtgatggaggagcggaagatcaaggtgtacctgccccggatgaagatggaggagaagtacaacctgaccagcgtgctgatggccatgggcatcaccgacgtgttcagcagcagcgccaacctgagcggcatcagcagcgccgagagcctgaagatcagccaggccgtgcacgccgcccacgccgagatcaacgaggccggccgggaggtggtgggcagcgccgaggccggcgtggacgccgccagcgtgagcgaggagttccgggccgaccaccccttcctgttctgcatcaagcacatcgccaccaacgccgtgctgttcttcggccggtgcgtgagcccctga

SEQ ID NO: 189 - protein, 8 aa, synthetic construct
  REGION 1..8: note = Ovalbumin antigen, residues 257-264 of Ovalbumin peptide SEQ ID NO. 187
SIINFEKL

SEQ ID NO: 190 - protein, 16 aa, synthetic construct
  REGION 1..16: note = Ovalbumin antigen, residues 323-339 of Ovalbumin peptide SEQ ID NO. 187
SQAVHAAHAEINEAGR

SEQ ID NO: 191 - protein, 386 aa, synthetic construct
  REGION 1..386: note = Ovalbumin with methionine included
MGSIGAASMEFCFDVFKELKVHHANENIFYCPIAIMSALAMVYLGAKDSTRTQINKVVRFDKLPGFGDSIEAQCGTSVNVHSSLRDILNQITKPNDVYSFSLASRLYAEERYPILPEYLQCVKELYRGGLEPINFQTAADQARELINSWVESQTNGIIRNVLQPSSVDSQTAMVLVNAIVFKGLWEKTFKDEDTQAMPFRVTEQESKPVQMMYQIGLFRVASMASEKMKILELPFASGTMSMLVLLPDEVSGLEQLESIINFEKLTEWTSSNVMEERKIKVYLPRMKMEEKYNLTSVLMAMGITDVFSSSANLSGISSAESLKISQAVHAAHAEINEAGREVVGSAEAGVDAASVSEEFRADHPFLFCIKHIATNAVLFFGRCVSP

SEQ ID NO: 192 - protein, 17 aa, synthetic construct
  REGION 1..17: note = Ovalbumin dominant epitope, residues 323-339 of Ovalbumin peptide SEQ ID NO. 187
ISQAVHAAHAEINEAGR

SEQ ID NO: 193 - DNA, 19 bp, synthetic construct
  source 1..19: mol_type = other DNA; note = ONDX (or cobitolimob, class B CpG oligonucleotide agonist of TLR9)
ggaacagttcgtccatggc

SEQ ID NO: 194 - DNA, 20 bp, synthetic construct
  source 1..20: mol_type = other DNA; note = ONDA (Invivogen, vaccine grade ODN 1585 a class A CpG oligonucleotide agonist of TLR9)
  misc_feature 1..2: note = phosphonothioate bonds
  misc_feature 15..20: note = phosphonothioate bonds
  misc_feature 3..14: note = phosphodiester bonds
ggggtcaacgttgagggggg

SEQ ID NO: 195 - DNA, 10 bp, synthetic construct
  source 1..10: mol_type = other DNA; note = S3 1
  misc_feature 1..10: note = phosphonothioate bonds
aggcgttttt

SEQ ID NO: 196 - DNA, 24 bp, synthetic construct
  source 1..24: mol_type = other DNA; note = S3 2
  misc_feature 1..24: note = phosphonothioates bonds
tggtttttttcgtttttttttttt

SEQ ID NO: 197 - DNA, 24 bp, synthetic construct
  source 1..24: mol_type = other DNA; note = S3 3
  misc_feature 1..24: note = phosphonothioates bonds
tcgtttttttcgtttttttttttt

SEQ ID NO: 198 - DNA, 14 bp, synthetic construct
  source 1..14: mol_type = other DNA; note = CpG 3
  misc_feature 1..14: note = phosphonothioates bonds
tggttcgttttttt

SEQ ID NO: 199 - DNA, 17 bp, synthetic construct
  source 1..17: mol_type = other DNA; note = CpG 4
  misc_feature 1..17: note = phosphonothioates bonds
tggtttcgttttttttt

SEQ ID NO: 200 - DNA, 18 bp, synthetic construct
  source 1..18: mol_type = other DNA; note = CpG 5
  misc_feature 1..18: note = phosphonothioates bonds
tggttttcgttttttttt

SEQ ID NO: 201 - DNA, 20 bp, synthetic construct
  source 1..20: mol_type = other DNA; note = CpG 6
  misc_feature 1..20: note = phosphonothioates bonds
tggtttttcgtttttttttt

SEQ ID NO: 202 - DNA, 22 bp, synthetic construct
  source 1..22: mol_type = other DNA; note = CpG 7
  misc_feature 1..22: note = phosphonothioates bonds
tggttttttcgttttttttttt

SEQ ID NO: 203 - DNA, 12 bp, synthetic construct
  source 1..12: mol_type = other DNA; note = CpG 8
  misc_feature 1..12: note = phosphonothioates bonds
tcgtcgtttttt

SEQ ID NO: 204 - DNA, 14 bp, synthetic construct
  source 1..14: mol_type = other DNA; note = CpG 9
  misc_feature 1..14: note = phosphonothioates bonds
tcgttcgttttttt

SEQ ID NO: 205 - DNA, 16 bp, synthetic construct
  source 1..16: mol_type = other DNA; note = CpG 10
  misc_feature 1..16: note = phosphonothioates bonds
tcgtttcgtttttttt

SEQ ID NO: 206 - DNA, 18 bp, synthetic construct
  source 1..18: mol_type = other DNA; note = CpG 11
  misc_feature 1..18: note = phosphonothioates bonds
tcgttttcgttttttttt

SEQ ID NO: 207 - DNA, 20 bp, synthetic construct
  source 1..20: mol_type = other DNA; note = CpG 12
  misc_feature 1..20: note = phosphonothioates bonds
tcgtttttcgtttttttttt

SEQ ID NO: 208 - DNA, 22 bp, synthetic construct
  source 1..22: mol_type = other DNA; note = CpG 13
  misc_feature 1..22: note = phosphonothioates bonds
tcgttttttcgttttttttttt

SEQ ID NO: 209 - DNA, 24 bp, synthetic construct
  source 1..24: mol_type = other DNA; note = 53
  misc_feature 1..24: note = phosphonothioates bonds
tggtggttttgtcgttttgtggtt

SEQ ID NO: 210 - DNA, 24 bp, synthetic construct
  source 1..24: mol_type = other DNA; note = 57
  misc_feature 1..24: note = phosphonothioates bonds
tggtggttttgtggttttgtggtt

SEQ ID NO: 211 - DNA, 22 bp, synthetic construct
  source 1..22: mol_type = other DNA; note = 57-2
  misc_feature 1..22: note = phosphonothioates bonds
tggtggttttgtggttttgtgg

SEQ ID NO: 212 - DNA, 20 bp, synthetic construct
  source 1..20: mol_type = other DNA; note = 57-4
  misc_feature 1..20: note = phosphonothioates bonds
tggtggttttgtggttttgt

SEQ ID NO: 213 - DNA, 18 bp, synthetic construct
  source 1..18: mol_type = other DNA; note = 57-6
  misc_feature 1..18: note = phosphonothioates bonds
tggtggttttgtggtttt

SEQ ID NO: 214 - DNA, 16 bp, synthetic construct
  source 1..16: mol_type = other DNA; note = 57-8
  misc_feature 1..16: note = phosphonothioates bonds
tggtggttttgtggtt

SEQ ID NO: 215 - DNA, 22 bp, synthetic construct
  source 1..22: mol_type = other DNA; note = 2-57
gtggttttgtggttttgtggtt

SEQ ID NO: 216 - DNA, 20 bp, synthetic construct
  source 1..20: mol_type = other DNA; note = 4-57
  misc_feature 1..20: note = phosphonothioates bonds
ggttttgtggttttgtggtt

SEQ ID NO: 217 - DNA, 18 bp, synthetic construct
  source 1..18: mol_type = other DNA; note = 6-57
  misc_feature 1..18: note = phosphonothioates bonds
ttttgtggttttgtggtt

SEQ ID NO: 218 - DNA, 16 bp, synthetic construct
  source 1..16: mol_type = other DNA; note = 8-57
  misc_feature 1..16: note = phosphonothioates bonds
ttgtggttttgtggtt

SEQ ID NO: 219 - DNA, 24 bp, synthetic construct
  source 1..24: mol_type = other DNA; note = 57-A
  misc_feature 1..24: note = phosphonothioates bonds
taataattttataattttataatt

SEQ ID NO: 220 - DNA, 24 bp, synthetic construct
  source 1..24: mol_type = other DNA; note = 57-A1
  misc_feature 1..24: note = phosphonothioates bonds
taatggttttgtggttttgtggtt

SEQ ID NO: 221 - DNA, 24 bp, synthetic construct
  source 1..24: mol_type = other DNA; note = 57-A2
  misc_feature 1..24: note = phosphonothioates bonds
tggtggttttgtggttttgtaatt

SEQ ID NO: 222 - DNA, 24 bp, synthetic construct
  source 1..24: mol_type = other DNA; note = 57-A3
tggtggttttgtaattttgtggtt

SEQ ID NO: 223 - DNA, 16 bp, synthetic construct
  source 1..16: mol_type = other DNA; note = 57-8A
  misc_feature 1..16: note = phosphonothioates bonds
taataattttataatt

SEQ ID NO: 224 - DNA, 16 bp, synthetic construct
  source 1..16: mol_type = other DNA; note = 57-8A1
  misc_feature 1..16: note = phosphonothioates bonds
taatggttttgtggtt

SEQ ID NO: 225 - DNA, 16 bp, synthetic construct
  source 1..16: mol_type = other DNA; note = 57-8A2
  misc_feature 1..16: note = phosphonothioates bonds
tggtggttttgtaatt

SEQ ID NO: 226 - DNA, 16 bp, synthetic construct
  source 1..16: mol_type = other DNA; note = 57-8A3
  misc_feature 1..16: note = phosphonothioates bonds
tggtaattttgtggtt

SEQ ID NO: 227 - DNA, 24 bp, synthetic construct
  source 1..24: mol_type = other DNA; note = CpG-B
  misc_feature 1..24: note = phosphonothioates bonds
tcgtcgttttgtcgttttgtcgtt

SEQ ID NO: 228 - DNA, 22 bp, synthetic construct
  source 1..22: mol_type = other DNA; note = CpG-C
  misc_feature 1..22: note = phosphonothioates bonds
tcgtcgttttcggcgcgcgccg

SEQ ID NO: 229 - DNA, 12 bp, synthetic construct
  source 1..12: mol_type = other DNA; note = CpG 8(PO)
  misc_feature 1..12: note = phosphodiester bonds
tcgtcgtttttt

SEQ ID NO: 230 - DNA, 24 bp, synthetic construct
  source 1..24: mol_type = other DNA; note = 57(PO)
  misc_feature 1..24: note = phosphodiester bonds
tggtggttttgtggttttgtggtt

SEQ ID NO: 231 - DNA, 16 bp, synthetic construct
  source 1..16: mol_type = other DNA; note = 18
  misc_feature 1..16: note = phosphonothioates bonds
  misc_feature 1..3: note = 2cET modifications
  misc_feature 14..16: note = 2cET modifications
ctcttgatttctcagc

SEQ ID NO: 232 - DNA, 16 bp, synthetic construct
  source 1..16: mol_type = other DNA; note = 95
  misc_feature 1..16: note = phosphonothioates bonds
  misc_feature 1..3: note = 2cET modifications
  misc_feature 14..16: note = 2cET modifications
gacatagttaattgcc

SEQ ID NO: 233 - DNA, 16 bp, synthetic construct
  source 1..16: mol_type = other DNA; note = 05
  misc_feature 1..16: note = phosphonothioates (PS) bonds
  misc_feature 1..3: note = 2cET modifications
  misc_feature 14..16: note = 2cET modifications
tctcatttatttcggc

SEQ ID NO: 234 - DNA, 16 bp, synthetic construct
  source 1..16: mol_type = other DNA; note = 549148
  misc_feature 1..3: note = 2cET modifications
  misc_feature 14..16: note = 2cET modifications
  misc_feature 1..16: note = phosphonothioates (PS) bonds
ggctactacgccgtca

SEQ ID NO: 235 - DNA, 16 bp, synthetic construct
  source 1..16: mol_type = other DNA; note = 549139
  misc_feature 1..16: note = phosphonothioates (PS) bonds
  misc_feature 1..3: note = 2cET modifications
  misc_feature 14..16: note = 2cET modifications
agcgcgcctgaaggtt

SEQ ID NO: 236 - DNA, 16 bp, synthetic construct
  source 1..16: mol_type = other DNA; note = 465131
  misc_feature 1..16: note = phosphonothioates (PS) bonds
  misc_feature 1..3: note = 2cET modifications
  misc_feature 14..16: note = 2cET modifications
tgccaccgtagacacg

SEQ ID NO: 237 - DNA, 16 bp, synthetic construct
  source 1..16: mol_type = other DNA; note = 469117
  misc_feature 1..3: note = 2cET modifications
  misc_feature 14..16: note = 2cET modifications
  misc_feature 1..16: note = phosphonothioates (PS) bonds
gtctgtgcatctctcc

SEQ ID NO: 238 - DNA, 16 bp, synthetic construct
  source 1..16: mol_type = other DNA; note = 508031
  misc_feature 1..3: note = 2cET modifications
  misc_feature 14..16: note = 2cET modifications
  misc_feature 1..16: note = phosphonothioates (PS) bonds
tgaggtcctgcactgg

SEQ ID NO: 239 - DNA, 16 bp, synthetic construct
  source 1..16: mol_type = other DNA; note = 482050
  misc_feature 1..3: note = 2cET modifications
  misc_feature 14..16: note = 2cET modifications
  misc_feature 1..16: note = phosphonothioates (PS) bonds
atcatggctgcagctt

SEQ ID NO: 240 - DNA, 16 bp, synthetic construct
  source 1..16: mol_type = other DNA; note = 18(2PO)
  misc_feature 1..3: note = 2cET modifications
  misc_feature 14..16: note = 2cET modifications
  misc_feature 1: note = phosphonothioates (PS) bonds
  misc_feature 16: note = phosphonothioates (PS) bonds
  misc_feature 4..13: note = phosphonothioates (PS) bonds
  misc_feature 2..3: note = phosphodiester (PO) bonds
  misc_feature 14..15: note = phosphodiester (PO) bonds
ctcttgatttgtcagc

SEQ ID NO: 241 - DNA, 16 bp, synthetic construct
  source 1..16: mol_type = other DNA; note = 05(2PO)
  misc_feature 1..3: note = 2cET modifications
  misc_feature 14..16: note = 2cET modifications
  misc_feature 2..3: note = phosphodiester (PO) bonds
  misc_feature 14..15: note = phosphodiester (PO) bonds
  misc_feature 1: note = phosphonothioates (PS) bonds
  misc_feature 16: note = phosphonothioates (PS) bonds
  misc_feature 4..13: note = phosphonothioates (PS) bonds
gacatagttaattgcc

SEQ ID NO: 242 - DNA, 16 bp, synthetic construct
  source 1..16: mol_type = other DNA; note = 95(2PO)
  misc_feature 1..3: note = 2cET modifications
  misc_feature 14..16: note = 2cET modifications
  misc_feature 2..3: note = phosphodiester (PO) bonds
  misc_feature 14..15: note = phosphodiester (PO) bonds
  misc_feature 4..13: note = phosphonothioates (PS) bonds
  misc_feature 1: note = phosphonothioates (PS) bonds
  misc_feature 16: note = phosphonothioates (PS) bonds
tctcatttatttcggc

SEQ ID NO: 243 - DNA, 16 bp, synthetic construct
  source 1..16: mol_type = other DNA; note = H154
  misc_feature 1..16: note = phosphonothioates (PS) bonds
cctcaagcttgagggg

SEQ ID NO: 244 - DNA, 20 bp, synthetic construct
  source 1..20: mol_type = other DNA; note = 1502
  misc_feature 1..20: note = phosphonothioates (PS) bonds
gagcaagctggaccttccat

SEQ ID NO: 245 - DNA, 18 bp, synthetic construct
  source 1..18: mol_type = other DNA; note = 4000
  misc_feature 1..18: note = phosphonothioates (PS) bonds
ttagggttagggttaggg

SEQ ID NO: 246 - DNA, 21 bp, synthetic construct
  source 1..21: mol_type = other DNA; note = G-ODN
  misc_feature 1..21: note = phosphonothioates (PS) bonds
ctcctattgggggtttcctat

SEQ ID NO: 247 - DNA, 18 bp, synthetic construct
  source 1..18: mol_type = other DNA; note = IRS954
  misc_feature 1..18: note = phosphonothioates (PS) bonds
tgctcctggaggggttgt

SEQ ID NO: 248 - DNA, 15 bp, synthetic construct
  source 1..15: mol_type = other DNA; note = IRS869
  misc_feature 1..15: note = phosphonothioates (PS) bonds
tcctggaggggttgt

SEQ ID NO: 249 - DNA, 24 bp, synthetic construct
  source 1..24: mol_type = other DNA; note = INH
  misc_feature 1..24: note = phosphonothioates (PS) bonds
cctggatgggaacttaccgctgca

SEQ ID NO: 250 - DNA, 15 bp, synthetic construct
  source 1..15: mol_type = other DNA; note = 2114R
  misc_feature 1..15: note = phosphonothioates (PS) bonds
tgaaggggaggtcct

SEQ ID NO: 251 - DNA, 18 bp, synthetic construct
  source 1..18: mol_type = other DNA; note = 4352
  misc_feature 1..18: note = phosphonothioates (PS) bonds
tccttcctggaggggaag

SEQ ID NO: 252 - DNA, 19 bp, synthetic construct
  source 1..19: mol_type = other DNA; note = 4191
  misc_feature 1..19: note = phosphonothioates (PS) bonds
tcctatcctggaggggaag

SEQ ID NO: 253 - DNA, 24 bp, synthetic construct
  source 1..24: mol_type = other DNA; note = 4351
  misc_feature 1..24: note = phosphonothioates (PS) bonds
tcctatcctatcctggaggggaag

SEQ ID NO: 254 - DNA, 19 bp, synthetic construct
  source 1..19: mol_type = other DNA; note = 4348
  misc_feature 1..19: note = phosphonothioates (PS) bonds
tcgtatcctggaggggaag

SEQ ID NO: 255 - DNA, 19 bp, synthetic construct
  source 1..19: mol_type = other DNA; note = 4348
  misc_feature 1..19: note = phosphonothioates (PS) bonds
taatatcctggaggggaag

SEQ ID NO: 256 - DNA, 18 bp, synthetic construct
  source 1..18: mol_type = other DNA; note = 4347
  misc_feature 1..18: note = phosphonothioates (PS) bonds
cctatcctggaggggaag

SEQ ID NO: 257 - DNA, 19 bp, synthetic construct
  source 1..19: mol_type = other DNA; note = 4350
  misc_feature 1..19: note = phosphonothioates (PS) bonds
tcctataatggaggggaag

SEQ ID NO: 258 - DNA, 21 bp, synthetic construct
  source 1..21: mol_type = other DNA; note = ODN 2216
  misc_feature 1..21: note = phosphonothioates (PS) bonds
tgggggacgatcgtcgggggg

SEQ ID NO: 259 - DNA, 18 bp, synthetic construct
  source 1..18: mol_type = other DNA; note = Hygro 1 Fwd primer
agcgtctccgacctgatg

SEQ ID NO: 260 - DNA, 17 bp, synthetic construct
  source 1..17: mol_type = other DNA; note = Hygro 2 Rev primer
cgacggacgactgacgg

SEQ ID NO: 261 - DNA, 20 bp, synthetic construct
  source 1..20: mol_type = other DNA; note = f-LUC1
ccagggatttcagtcgatgt

SEQ ID NO: 262 - DNA, 20 bp, synthetic construct
  source 1..20: mol_type = other DNA; note = f-LUC2
aatctcacgcaggcagttct

SEQ ID NO: 263 - DNA, 22 bp, synthetic construct
  source 1..22: mol_type = other DNA; note = GFP Fwd Primer
gtccaggagcgcaccatcttct

SEQ ID NO: 264 - DNA, 24 bp, synthetic construct
  source 1..24: mol_type = other DNA; note = GFP Rev Primer
gatgcccttcagctcgatgcggtt

SEQ ID NO: 265 - DNA, 20 bp, synthetic construct
  source 1..20: mol_type = other DNA; note = eGFP (1-1) Fwd3 Primer
cacatgaagcagcacgactt

SEQ ID NO: 266 - DNA, 18 bp, synthetic construct
  source 1..18: mol_type = other DNA; note = eGFP (1-1) Rev3 Primer
gcgcgggtcttgtagttg

SEQ ID NO: 267 - DNA, 20 bp, synthetic construct
  source 1..20: mol_type = other DNA; note = mCherry(1-1) Fwd1 Primer
gaccacctacaaggccaaga

SEQ ID NO: 268 - DNA, 18 bp, synthetic construct
  source 1..18: mol_type = other DNA; note = mCherry(1-1) Rev1 Primer
ccgctcgtactgctccac

SEQ ID NO: 269 - DNA, 20 bp, synthetic construct
  source 1..20: mol_type = other DNA; note = Gus Fwd Primer
cgctcacaccgataccatca

SEQ ID NO: 270 - DNA, 20 bp, synthetic construct
  source 1..20: mol_type = other DNA; note = Gus Rev Primer
cggctgatgcagtttctcct

SEQ ID NO: 271 - DNA, 7854 bp, synthetic construct
  source 1..7854: mol_type = other DNA; note = pAGS-0001 EF2 promoter
accttccattttgacatgtttcctagctagaaggaacagctattcatatgaattttccgaggtcacgctgtgatggatcgattcgttcccgtcacagacgcaagcagcgaggtgatggctggacgggcacgcgtcacaatttagaacaacccggactcttgtgacgcgagctccgggtgcggaaaaccctacggggtgaaaggagccgcagcttccacccatttacttgactgataacccagtacacacaacgctaccgtgacggaaatgccgcgcgctgtgaagccgtggtgaatctttcgctgctgctcgttctctccacacacacaacagtattcagtcgactggtaccaacaggctatggaggacgccaagaacatcaagaagggccccgcccccttctaccccctggaggacggcaccgccggcgagcagctgcacaaggccatgaagcgctacgccctggtgcccggcaccatcgccttcaccgacgcccacatcgaggtggacatcacctacgccgagtacttcgagatgagcgtgcgcctggccgaggccatgaagcgctacggcctgaacaccaaccaccgcatcgtggtgtgcagcgagaacagcctgcagttcttcatgcccgtgctgggcgccctgttcatcggcgtggccgtggcccccgccaacgacatctacaacgagcgcgagctgctgaacagcatgggcatcagccagcccaccgtggtgttcgtgagcaagaagggcctgcagaagatcctgaacgtgcagaagaagctgcccatcatccagaagatcatcatcatggacagcaagaccgactaccagggcttccagagcatgtacaccttcgtgaccagccacctgccccccggcttcaacgagtacgacttcgtgcccgagagcttcgaccgcgacaagaccatcgccctgatcatgaacagcagcggcagcaccggcctgcccaagggcgtggccctgccccaccgcaccgcctgcgtgcgcttcagccacgcccgcgaccccatcttcggcaaccagatcatccccgacaccgccatcctgagcgtggtgcccttccaccacggcttcggcatgttcaccaccctgggctacctgatctgcggcttccgcgtggtgctgatgtaccgcttcgaggaggagctgttcctgcgcagcctgcaggactacaagatccagagcgccctgctggtgcccaccctgttcagcttcttcgccaagagcaccctgatcgacaagtacgacctgagcaacctgcacgagatcgccagcggcggcgcccccctgagcaaggaggtgggcgaggccgtggccaagcgcttccacctgcccggcatccgccagggctacggcctgaccgagaccaccagcgccatcctgatcacccccgagggcgacgacaagcccggcgccgtgggcaaggtggtgcccttcttcgaggccaaggtggtggacctggacaccggcaagaccctgggcgtgaaccagcgcggcgagctgtgcgtgcgcggccccatgatcatgagcggctacgtgaacaaccccgaggccaccaacgccctgatcgacaaggacggctggctgcacagcggcgacatcgcctactgggacgaggacgagcacttcttcatcgtggaccgcctgaagagcctgatcaagtacaagggctaccaggtggcccccgccgagctggagagcatcctgctgcagcaccccaacatcttcgacgccggcgtggccggcctgcccgacgacgacgccggcgagctgcccgccgccgtggtggtgctggagcacggcaagaccatgaccgagaaggagatcgtggactacgtggccagccaggtgaccaccgccaagaagctgcgcggcggcgtggtgttcgtggacgaggtgcccaagggcctgaccggcaagctggacgcccgcaagatccgcgagatcctgatcaaggccaagaagggcggcaagatcgccgtgtcaggtggatcctagataacctttaccttcattccctgtaaattggtaccctgcaaagctttcgttcgtatcatcggtttcgacaacgttcgtcaagttcaatgcatcagtttcattgcgcacacaccagaatcctactgagtttgagtattatggcattgggaaaactgtttttcttgtaccatttgttgtgcttgtaatttactgtgttttttattcggttttcgctatcgaactgtgaaatggaaatggatggagaagagttaatgaatgatatggtccttttgttcattctcaaattaatattatttgttttttctcttatttgttgtgtgttgaatttgaaattataagagatatgcaaacattttgttttgagtaaaaatgtgtcaaatcgtggcctctaatgaccgaagttaatatgaggagtaaaacacttgtagttgtaccattatgcttattcactaggcaacaaatatattttcagacctagaaaagctgcaaatgttactgaatacaagtatgtcctcttgtgttttagacatttatgaactttcctttatgtaattttccagaatccttgtcagattctaatcattgctttataattatagttatactcatggatttgtagttgagtatgaaaatattttttaatgcattttatgacttgccaattgattgacaacatgcatcaatcgactagtcgacgagtcagtaataaacggcgtcaaagtggttgcagccggcacacacgagtcgtgtttatcaactcaaagcacaaatacttttcctcaacctaaaaataaggcaattagccaaaaacaactttgcgtgtaaacaacgctcaatacacgtgtcattttattattagctattgcttcaccgccttagctttctcgtgacctagtcgtcctcgtcttttcttcttcttcttctataaaacaatacccaaagagctcttcttcttcacaattcagatttcaatttctcaaaatcttaaaaactttctctcaattctctctaccgtgatcaaggtaaatttctgtgttccttattctctcaaaatcttcgattttgttttcgttcgatcccaatttcgtatatgttctttggtttagattctgttaatcttagatcgaagacgattttctgggtttgatcgttagatatcatcttaattctcgattagggtttcatagatatcatccgatttgttcaaataatttgagttttgtcgaataattactcttcgatttgtgatttctatctagatctggtgttagtttctagtttgtgcgatcgaatttgtagattaatctgagtttttctgattaacaccacaccaatctggtaccagaaaaggggagaagcaaaaccatgggtaaaaagcctgaactcaccgcgacgtctgtcgagaagtttctgatcgaaaagttcgacagcgtctccgacctgatgcagctctcggagggcgaagaatctcgtgctttcagcttcgatgtaggagggcgtggatatgtcctgcgggtaaatagctgcgccgatggtttctacaaagatcgttatgtttatcggcactttgcatcggccgcgctcccgattccggaagtgcttgacattggggcattcagcgagagcctgacctattgcatctcccgccgtgcacagggtgtcacgttgcaagacctgcctgaaaccgaactgcccgctgttctgcaaccggtcgcggaggcgatggatgccatcgctgcggccgatcttagccagacgagcgggttcggcccattcggaccgcaaggaatcggtcaatacactacatggcgtgatttcatatgcgcgattgctgatccccatgtgtatcactggcaaactgtgatggacgacaccgtcagtgcgtccgtcgcgcaggctctcgatgagctgatgctttgggccgaggactgccccgaagtccggcacctcgtgcacgcggatttcggctccaacaatgtcctgacggacaatggccgcataacagcggtcattgactggagcgaggcgatgttcggggattcccaatacgaggtcgccaacatcttcttctggaggccgtggttggcttgtatggagcagcagacgcgctacttcgagcggaggcatccggagcttgcaggatcgccgcggctccgggcgtatatgctccgcattggtcttgaccaactctatcagagcttggttgacggcaatttcgatgatgcagcttgggcgcagggtcgatgcgacgcaatcgtccgatccggagccgggactgtcgggcgtacacaaatcgcccgcagaagcgcggccgtctggaccgatggctgtgtagaagtactcgccgatagtggaaaccgacgccccagcactcgtccgagggcaaaggaatagatgcatcctgctttaatgagatatgcgagacgcctatgatcgcatgatatttgctttcaattctgttgtgcacgttgtaaaaaacctgagcatgtgtagctcagatccttaccgccggtttcggttcattctaatgaatatatcacccgttactatcgtatttttatgaataatattctccgttcaatttactgattgtaccctactacttatatgtacaatattaaaatgaaaacaatatattgtgctgaataggtttatagcgacatctatgatagagcgccacaataacaaacaattgcgttttattattacaaatccaattttaaaaaaagcggcagaaccggtcaaacctaaaagactgattacataaatcttattcaaatttcaaaagtgccccaggggctagtatctacgacacaccgagcggcgaactaataacgctcactgaagggaactccggttccccgccggcgcgcatgggtgagattccttgaagttgagtattggccgtccgctctaccgaaagttacgggcaccattcaacccggtccagcacggcggccgggtaaccgacttgctgccccgagaattatgcagcatttttttggtgtatgtgggccccaaatgaagtgcaggtcaaaccttgacagtgacgacaaatcgttgggcgggtccagggcgaattttgcgacaacatgtcgaggctcagcaggaccggcatgcaagctagcttactagtgatattctatagtgtcacctaaatgtattctagaccaagcatgcacagctggcgttctcagccagatccaacgttacaccacaatatatcctgccaagatctaattccggggatcggaaatccagaagcccgagaggttgccgcctttcgggctttttctttttcaaaaaaaaaaatttataaaacgatctgttgcggccggccgccgggttgtgggcaaaggcgctcgacggtgggcaaccgcttgcggttgtccacgggcggagccggtgcgcgtagcgcattgtccacaagccaagggcgaccaataattgatatatatattcataattgaaaagctaattgaacatactacttgctgtaactacttgccggagcgaggggtgtttgcaagctgttgatctgaaagggctattagcgttctcacgtgcctttttgattagcgatttcacgtgaccttattagcgatttcacgtactccgattagcgatttcacgtaccctgattagcgatttcacgtggatagtttttggagcgggccggaaagccccgtgaatcaaggctttgcggggcattagcggtttcacgtggataactaccctctatccacaggcttccggggataaaaaagcccgctcgacggcgggctgttggatggggatcgcctgaatcgccccatcatccagccagaaagtgagggagccacggttgatgagagctttgttgtaggtggaccagttggtgattttgaacttttgctttgccacggaacggtctgcgttgtcgggaagatgcgtgatctgatccttcaactcagcaaaagttcgatttattcaacaaagccacgttgtgtctcaaaatctctgatgttacattgcacaagataaaaatatatcatcatgaacaataaaactgtctgcttacataaacagtaatacaaggggtgttatgagggaagcggtgatcgccgaagtatcgactcaactatcagaggtagttggcgtcatcgagcgccatctcgaaccgacgttgctggccgtacatttgtacggctccgcagtggatggcggcctgaagccacacagtgatattgatttgctggttacggtgaccgtaaggcttgatgaaacaacgcggcgagctttgatcaacgaccttttggaaacttcggcttcccctggagagagcgagattctccgcgctgtagaagtcaccattgttgtgcacgacgacatcattccgtggcgttatccagctaagcgcgaactgcaatttggagaatggcagcgcaatgacattcttgcaggtatcttcgagccagccacgatcgacattgatctggctatcttgctgacaaaagcaagagaacatagcgttgccttggtaggtccagcggcggaggaactctttgatccggttcctgaacaggatctatttgaggcgctaaatgaaaccttaacgctatggaactcgccgcccgactgggctggcgatgagcgaaatgtagtgcttacgttgtcccgcatttggtacagcgcagtaaccggcaaaatcgcgccgaaggatgtcgctgccgactgggcaatggagcgcctgccggcccagtatcagcccgtcatacttgaagctaggcaggcttatcttggacaagaagatcgcttggcctcgcgcgcagatcagttggaagaatttgttcactacgtgaaaggcgagatcaccaaggtagtcggcaaataatcactagaccaatgttacacatatatactttagattgatttaaaacttcatttttaatttaaaaggatctaggtgaagatcctttttgataatctcatgaccaaaatcccttaacgtgagttttcgttccactgagcgtcagaccccgtagaaaagatcaaaggatcttcttgagatcctttttttctgcgcgtaatctgctgcttgcaaacaaaaaaaccaccgctaccagcggtggtttgtttgccggatcaagagctaccaactcttcttccgaaggtaactggcttcagcagagcgcagataccaaatactgttcttctagtgtagccgtagttaggccaccacttcaagaactctgtagcaccgcctacatacctcgctctgctaatcctgttaccagtggctgctgccagtggcgataagtcgtgtcttaccgggttggactcaagacgatagttaccggataaggcgcagcggtcgggctgaacggggggttcgtgcacacagcccagcttggagcgaacgacctacaccgaactgagatacctacagcgtgagctatgagaaagcgccacgcttcccgaagggagaaaggcggacaggtatccggtaagcggcagggtcggaacaggagagcgcacgagggagcttccagggggaaacgcctggtatctttatagtcctgtcgggtttcgccacctctgacttgagcgtcgatttttgtgatgctcgtcaggggggcggagcctatggaaaaacgccagcaacgcggcctttttacggttcctggccttttgctggccttttgctcacatgagatctcaaacaaacacatacagcgacttagtttacccgccaatatatcctgtcaaggctcgaactaggctcggacgaagtaagcggccgcaaccttaattaaacacggcgcgccaacagcgatcgcaccaggtacc

SEQ ID NO: 272 - DNA, 8180 bp, synthetic construct
  source 1..8180: mol_type = other DNA; note = pAGS-0002 Histone 4 promoter
acctgcaatctcacgcaccaggcgctggaagggcaacttgcggatgagaaggtccgtggacttctggtaacgacggatctcacgcagagcgacggttccagggcgataacggtggggcttcttgactcctccggtagccggagcggacttacgggcagccttggtggcaagctgcttgcgcggcgctttgcctccggtggatttacgggcggtttgcttggttcgggccattttgacggttttttttacaagagaagagttcttgaaatttgtgaggttaaagtgtgtggcttccgccgtagtcaaggagcgtgcggttgccgatcgcaccggtacgttctgtagaaatgaacacagtgtgttgaattgaaagtatggcgcaggtatggtgtgtgataagtagcagccgcgccgagacaaacaaactttggtttctacgacaatctctgtagacaagtactagaaacccgtttgaacgagcataaatctgcaccggcaggccaccagacatcgtttcaacgtaatattctacgtaaccattttatcccaggaaacctacggcctgtgaaccactgaaaggaagcactcacaattcgctctcggcaacaaccgacaatagtcttactcacagtcaataccgaaaacaaacaacagaacagtattcagtcgactggtaccaacaggctatggaggacgccaagaacatcaagaagggccccgcccccttctaccccctggaggacggcaccgccggcgagcagctgcacaaggccatgaagcgctacgccctggtgcccggcaccatcgccttcaccgacgcccacatcgaggtggacatcacctacgccgagtacttcgagatgagcgtgcgcctggccgaggccatgaagcgctacggcctgaacaccaaccaccgcatcgtggtgtgcagcgagaacagcctgcagttcttcatgcccgtgctgggcgccctgttcatcggcgtggccgtggcccccgccaacgacatctacaacgagcgcgagctgctgaacagcatgggcatcagccagcccaccgtggtgttcgtgagcaagaagggcctgcagaagatcctgaacgtgcagaagaagctgcccatcatccagaagatcatcatcatggacagcaagaccgactaccagggcttccagagcatgtacaccttcgtgaccagccacctgccccccggcttcaacgagtacgacttcgtgcccgagagcttcgaccgcgacaagaccatcgccctgatcatgaacagcagcggcagcaccggcctgcccaagggcgtggccctgccccaccgcaccgcctgcgtgcgcttcagccacgcccgcgaccccatcttcggcaaccagatcatccccgacaccgccatcctgagcgtggtgcccttccaccacggcttcggcatgttcaccaccctgggctacctgatctgcggcttccgcgtggtgctgatgtaccgcttcgaggaggagctgttcctgcgcagcctgcaggactacaagatccagagcgccctgctggtgcccaccctgttcagcttcttcgccaagagcaccctgatcgacaagtacgacctgagcaacctgcacgagatcgccagcggcggcgcccccctgagcaaggaggtgggcgaggccgtggccaagcgcttccacctgcccggcatccgccagggctacggcctgaccgagaccaccagcgccatcctgatcacccccgagggcgacgacaagcccggcgccgtgggcaaggtggtgcccttcttcgaggccaaggtggtggacctggacaccggcaagaccctgggcgtgaaccagcgcggcgagctgtgcgtgcgcggccccatgatcatgagcggctacgtgaacaaccccgaggccaccaacgccctgatcgacaaggacggctggctgcacagcggcgacatcgcctactgggacgaggacgagcacttcttcatcgtggaccgcctgaagagcctgatcaagtacaagggctaccaggtggcccccgccgagctggagagcatcctgctgcagcaccccaacatcttcgacgccggcgtggccggcctgcccgacgacgacgccggcgagctgcccgccgccgtggtggtgctggagcacggcaagaccatgaccgagaaggagatcgtggactacgtggccagccaggtgaccaccgccaagaagctgcgcggcggcgtggtgttcgtggacgaggtgcccaagggcctgaccggcaagctggacgcccgcaagatccgcgagatcctgatcaaggccaagaagggcggcaagatcgccgtgtcaggtggatcctagataacctttaccttcattccctgtaaattggtaccctgcaaagctttcgttcgtatcatcggtttcgacaacgttcgtcaagttcaatgcatcagtttcattgcgcacacaccagaatcctactgagtttgagtattatggcattgggaaaactgtttttcttgtaccatttgttgtgcttgtaatttactgtgttttttattcggttttcgctatcgaactgtgaaatggaaatggatggagaagagttaatgaatgatatggtccttttgttcattctcaaattaatattatttgttttttctcttatttgttgtgtgttgaatttgaaattataagagatatgcaaacattttgttttgagtaaaaatgtgtcaaatcgtggcctctaatgaccgaagttaatatgaggagtaaaacacttgtagttgtaccattatgcttattcactaggcaacaaatatattttcagacctagaaaagctgcaaatgttactgaatacaagtatgtcctcttgtgttttagacatttatgaactttcctttatgtaattttccagaatccttgtcagattctaatcattgctttataattatagttatactcatggatttgtagttgagtatgaaaatattttttaatgcattttatgacttgccaattgattgacaacatgcatcaatcgactagtcgacgagtcagtaataaacggcgtcaaagtggttgcagccggcacacacgagtcgtgtttatcaactcaaagcacaaatacttttcctcaacctaaaaataaggcaattagccaaaaacaactttgcgtgtaaacaacgctcaatacacgtgtcattttattattagctattgcttcaccgccttagctttctcgtgacctagtcgtcctcgtcttttcttcttcttcttctataaaacaatacccaaagagctcttcttcttcacaattcagatttcaatttctcaaaatcttaaaaactttctctcaattctctctaccgtgatcaaggtaaatttctgtgttccttattctctcaaaatcttcgattttgttttcgttcgatcccaatttcgtatatgttctttggtttagattctgttaatcttagatcgaagacgattttctgggtttgatcgttagatatcatcttaattctcgattagggtttcatagatatcatccgatttgttcaaataatttgagttttgtcgaataattactcttcgatttgtgatttctatctagatctggtgttagtttctagtttgtgcgatcgaatttgtagattaatctgagtttttctgattaacaccacaccaatctggtaccagaaaaggggagaagcaaaaccatgggtaaaaagcctgaactcaccgcgacgtctgtcgagaagtttctgatcgaaaagttcgacagcgtctccgacctgatgcagctctcggagggcgaagaatctcgtgctttcagcttcgatgtaggagggcgtggatatgtcctgcgggtaaatagctgcgccgatggtttctacaaagatcgttatgtttatcggcactttgcatcggccgcgctcccgattccggaagtgcttgacattggggcattcagcgagagcctgacctattgcatctcccgccgtgcacagggtgtcacgttgcaagacctgcctgaaaccgaactgcccgctgttctgcaaccggtcgcggaggcgatggatgccatcgctgcggccgatcttagccagacgagcgggttcggcccattcggaccgcaaggaatcggtcaatacactacatggcgtgatttcatatgcgcgattgctgatccccatgtgtatcactggcaaactgtgatggacgacaccgtcagtgcgtccgtcgcgcaggctctcgatgagctgatgctttgggccgaggactgccccgaagtccggcacctcgtgcacgcggatttcggctccaacaatgtcctgacggacaatggccgcataacagcggtcattgactggagcgaggcgatgttcggggattcccaatacgaggtcgccaacatcttcttctggaggccgtggttggcttgtatggagcagcagacgcgctacttcgagcggaggcatccggagcttgcaggatcgccgcggctccgggcgtatatgctccgcattggtcttgaccaactctatcagagcttggttgacggcaatttcgatgatgcagcttgggcgcagggtcgatgcgacgcaatcgtccgatccggagccgggactgtcgggcgtacacaaatcgcccgcagaagcgcggccgtctggaccgatggctgtgtagaagtactcgccgatagtggaaaccgacgccccagcactcgtccgagggcaaaggaatagatgcatcctgctttaatgagatatgcgagacgcctatgatcgcatgatatttgctttcaattctgttgtgcacgttgtaaaaaacctgagcatgtgtagctcagatccttaccgccggtttcggttcattctaatgaatatatcacccgttactatcgtatttttatgaataatattctccgttcaatttactgattgtaccctactacttatatgtacaatattaaaatgaaaacaatatattgtgctgaataggtttatagcgacatctatgatagagcgccacaataacaaacaattgcgttttattattacaaatccaattttaaaaaaagcggcagaaccggtcaaacctaaaagactgattacataaatcttattcaaatttcaaaagtgccccaggggctagtatctacgacacaccgagcggcgaactaataacgctcactgaagggaactccggttccccgccggcgcgcatgggtgagattccttgaagttgagtattggccgtccgctctaccgaaagttacgggcaccattcaacccggtccagcacggcggccgggtaaccgacttgctgccccgagaattatgcagcatttttttggtgtatgtgggccccaaatgaagtgcaggtcaaaccttgacagtgacgacaaatcgttgggcgggtccagggcgaattttgcgacaacatgtcgaggctcagcaggaccggcatgcaagctagcttactagtgatattctatagtgtcacctaaatgtattctagaccaagcatgcacagctggcgttctcagccagatccaacgttacaccacaatatatcctgccaagatctaattccggggatcggaaatccagaagcccgagaggttgccgcctttcgggctttttctttttcaaaaaaaaaaatttataaaacgatctgttgcggccggccgccgggttgtgggcaaaggcgctcgacggtgggcaaccgcttgcggttgtccacgggcggagccggtgcgcgtagcgcattgtccacaagccaagggcgaccaataattgatatatatattcataattgaaaagctaattgaacatactacttgctgtaactacttgccggagcgaggggtgtttgcaagctgttgatctgaaagggctattagcgttctcacgtgcctttttgattagcgatttcacgtgaccttattagcgatttcacgtactccgattagcgatttcacgtaccctgattagcgatttcacgtggatagtttttggagcgggccggaaagccccgtgaatcaaggctttgcggggcattagcggtttcacgtggataactaccctctatccacaggcttccggggataaaaaagcccgctcgacggcgggctgttggatggggatcgcctgaatcgccccatcatccagccagaaagtgagggagccacggttgatgagagctttgttgtaggtggaccagttggtgattttgaacttttgctttgccacggaacggtctgcgttgtcgggaagatgcgtgatctgatccttcaactcagcaaaagttcgatttattcaacaaagccacgttgtgtctcaaaatctctgatgttacattgcacaagataaaaatatatcatcatgaacaataaaactgtctgcttacataaacagtaatacaaggggtgttatgagggaagcggtgatcgccgaagtatcgactcaactatcagaggtagttggcgtcatcgagcgccatctcgaaccgacgttgctggccgtacatttgtacggctccgcagtggatggcggcctgaagccacacagtgatattgatttgctggttacggtgaccgtaaggcttgatgaaacaacgcggcgagctttgatcaacgaccttttggaaacttcggcttcccctggagagagcgagattctccgcgctgtagaagtcaccattgttgtgcacgacgacatcattccgtggcgttatccagctaagcgcgaactgcaatttggagaatggcagcgcaatgacattcttgcaggtatcttcgagccagccacgatcgacattgatctggctatcttgctgacaaaagcaagagaacatagcgttgccttggtaggtccagcggcggaggaactctttgatccggttcctgaacaggatctatttgaggcgctaaatgaaaccttaacgctatggaactcgccgcccgactgggctggcgatgagcgaaatgtagtgcttacgttgtcccgcatttggtacagcgcagtaaccggcaaaatcgcgccgaaggatgtcgctgccgactgggcaatggagcgcctgccggcccagtatcagcccgtcatacttgaagctaggcaggcttatcttggacaagaagatcgcttggcctcgcgcgcagatcagttggaagaatttgttcactacgtgaaaggcgagatcaccaaggtagtcggcaaataatcactagaccaatgttacacatatatactttagattgatttaaaacttcatttttaatttaaaaggatctaggtgaagatcctttttgataatctcatgaccaaaatcccttaacgtgagttttcgttccactgagcgtcagaccccgtagaaaagatcaaaggatcttcttgagatcctttttttctgcgcgtaatctgctgcttgcaaacaaaaaaaccaccgctaccagcggtggtttgtttgccggatcaagagctaccaactcttcttccgaaggtaactggcttcagcagagcgcagataccaaatactgttcttctagtgtagccgtagttaggccaccacttcaagaactctgtagcaccgcctacatacctcgctctgctaatcctgttaccagtggctgctgccagtggcgataagtcgtgtcttaccgggttggactcaagacgatagttaccggataaggcgcagcggtcgggctgaacggggggttcgtgcacacagcccagcttggagcgaacgacctacaccgaactgagatacctacagcgtgagctatgagaaagcgccacgcttcccgaagggagaaaggcggacaggtatccggtaagcggcagggtcggaacaggagagcgcacgagggagcttccagggggaaacgcctggtatctttatagtcctgtcgggtttcgccacctctgacttgagcgtcgatttttgtgatgctcgtcaggggggcggagcctatggaaaaacgccagcaacgcggcctttttacggttcctggccttttgctggccttttgctcacatgagatctcaaacaaacacatacagcgacttagtttacccgccaatatatcctgtcaaggctcgaactaggctcggacgaagtaagcggccgcaaccttaattaaacacggcgcgccaacagcgatcgcaccaggtacc

SEQ ID NO: 273 - DNA, 7670 bp, synthetic construct
  source 1..7670: mol_type = other DNA; note = pAGS-0003 Lhcf.1 promoter
acctgctgcaggacgcaatggaggattatcaccgcaaaaatgaacttcgaaaaaaactttcgagcgaccatggaaaaggaggatcagattcagattacaacagtggattgctctggtagcaaatatcttctgctagattggctcaacagtattcagtcgactggtaccaacaggctatggaggacgccaagaacatcaagaagggccccgcccccttctaccccctggaggacggcaccgccggcgagcagctgcacaaggccatgaagcgctacgccctggtgcccggcaccatcgccttcaccgacgcccacatcgaggtggacatcacctacgccgagtacttcgagatgagcgtgcgcctggccgaggccatgaagcgctacggcctgaacaccaaccaccgcatcgtggtgtgcagcgagaacagcctgcagttcttcatgcccgtgctgggcgccctgttcatcggcgtggccgtggcccccgccaacgacatctacaacgagcgcgagctgctgaacagcatgggcatcagccagcccaccgtggtgttcgtgagcaagaagggcctgcagaagatcctgaacgtgcagaagaagctgcccatcatccagaagatcatcatcatggacagcaagaccgactaccagggcttccagagcatgtacaccttcgtgaccagccacctgccccccggcttcaacgagtacgacttcgtgcccgagagcttcgaccgcgacaagaccatcgccctgatcatgaacagcagcggcagcaccggcctgcccaagggcgtggccctgccccaccgcaccgcctgcgtgcgcttcagccacgcccgcgaccccatcttcggcaaccagatcatccccgacaccgccatcctgagcgtggtgcccttccaccacggcttcggcatgttcaccaccctgggctacctgatctgcggcttccgcgtggtgctgatgtaccgcttcgaggaggagctgttcctgcgcagcctgcaggactacaagatccagagcgccctgctggtgcccaccctgttcagcttcttcgccaagagcaccctgatcgacaagtacgacctgagcaacctgcacgagatcgccagcggcggcgcccccctgagcaaggaggtgggcgaggccgtggccaagcgcttccacctgcccggcatccgccagggctacggcctgaccgagaccaccagcgccatcctgatcacccccgagggcgacgacaagcccggcgccgtgggcaaggtggtgcccttcttcgaggccaaggtggtggacctggacaccggcaagaccctgggcgtgaaccagcgcggcgagctgtgcgtgcgcggccccatgatcatgagcggctacgtgaacaaccccgaggccaccaacgccctgatcgacaaggacggctggctgcacagcggcgacatcgcctactgggacgaggacgagcacttcttcatcgtggaccgcctgaagagcctgatcaagtacaagggctaccaggtggcccccgccgagctggagagcatcctgctgcagcaccccaacatcttcgacgccggcgtggccggcctgcccgacgacgacgccggcgagctgcccgccgccgtggtggtgctggagcacggcaagaccatgaccgagaaggagatcgtggactacgtggccagccaggtgaccaccgccaagaagctgcgcggcggcgtggtgttcgtggacgaggtgcccaagggcctgaccggcaagctggacgcccgcaagatccgcgagatcctgatcaaggccaagaagggcggcaagatcgccgtgtcaggtggatcctagataacctttaccttcattccctgtaaattggtaccctgcaaagctttcgttcgtatcatcggtttcgacaacgttcgtcaagttcaatgcatcagtttcattgcgcacacaccagaatcctactgagtttgagtattatggcattgggaaaactgtttttcttgtaccatttgttgtgcttgtaatttactgtgttttttattcggttttcgctatcgaactgtgaaatggaaatggatggagaagagttaatgaatgatatggtccttttgttcattctcaaattaatattatttgttttttctcttatttgttgtgtgttgaatttgaaattataagagatatgcaaacattttgttttgagtaaaaatgtgtcaaatcgtggcctctaatgaccgaagttaatatgaggagtaaaacacttgtagttgtaccattatgcttattcactaggcaacaaatatattttcagacctagaaaagctgcaaatgttactgaatacaagtatgtcctcttgtgttttagacatttatgaactttcctttatgtaattttccagaatccttgtcagattctaatcattgctttataattatagttatactcatggatttgtagttgagtatgaaaatattttttaatgcattttatgacttgccaattgattgacaacatgcatcaatcgactagtcgacgagtcagtaataaacggcgtcaaagtggttgcagccggcacacacgagtcgtgtttatcaactcaaagcacaaatacttttcctcaacctaaaaataaggcaattagccaaaaacaactttgcgtgtaaacaacgctcaatacacgtgtcattttattattagctattgcttcaccgccttagctttctcgtgacctagtcgtcctcgtcttttcttcttcttcttctataaaacaatacccaaagagctcttcttcttcacaattcagatttcaatttctcaaaatcttaaaaactttctctcaattctctctaccgtgatcaaggtaaatttctgtgttccttattctctcaaaatcttcgattttgttttcgttcgatcccaatttcgtatatgttctttggtttagattctgttaatcttagatcgaagacgattttctgggtttgatcgttagatatcatcttaattctcgattagggtttcatagatatcatccgatttgttcaaataatttgagttttgtcgaataattactcttcgatttgtgatttctatctagatctggtgttagtttctagtttgtgcgatcgaatttgtagattaatctgagtttttctgattaacaccacaccaatctggtaccagaaaaggggagaagcaaaaccatgggtaaaaagcctgaactcaccgcgacgtctgtcgagaagtttctgatcgaaaagttcgacagcgtctccgacctgatgcagctctcggagggcgaagaatctcgtgctttcagcttcgatgtaggagggcgtggatatgtcctgcgggtaaatagctgcgccgatggtttctacaaagatcgttatgtttatcggcactttgcatcggccgcgctcccgattccggaagtgcttgacattggggcattcagcgagagcctgacctattgcatctcccgccgtgcacagggtgtcacgttgcaagacctgcctgaaaccgaactgcccgctgttctgcaaccggtcgcggaggcgatggatgccatcgctgcggccgatcttagccagacgagcgggttcggcccattcggaccgcaaggaatcggtcaatacactacatggcgtgatttcatatgcgcgattgctgatccccatgtgtatcactggcaaactgtgatggacgacaccgtcagtgcgtccgtcgcgcaggctctcgatgagctgatgctttgggccgaggactgccccgaagtccggcacctcgtgcacgcggatttcggctccaacaatgtcctgacggacaatggccgcataacagcggtcattgactggagcgaggcgatgttcggggattcccaatacgaggtcgccaacatcttcttctggaggccgtggttggcttgtatggagcagcagacgcgctacttcgagcggaggcatccggagcttgcaggatcgccgcggctccgggcgtatatgctccgcattggtcttgaccaactctatcagagcttggttgacggcaatttcgatgatgcagcttgggcgcagggtcgatgcgacgcaatcgtccgatccggagccgggactgtcgggcgtacacaaatcgcccgcagaagcgcggccgtctggaccgatggctgtgtagaagtactcgccgatagtggaaaccgacgccccagcactcgtccgagggcaaaggaatagatgcatcctgctttaatgagatatgcgagacgcctatgatcgcatgatatttgctttcaattctgttgtgcacgttgtaaaaaacctgagcatgtgtagctcagatccttaccgccggtttcggttcattctaatgaatatatcacccgttactatcgtatttttatgaataatattctccgttcaatttactgattgtaccctactacttatatgtacaatattaaaatgaaaacaatatattgtgctgaataggtttatagcgacatctatgatagagcgccacaataacaaacaattgcgttttattattacaaatccaattttaaaaaaagcggcagaaccggtcaaacctaaaagactgattacataaatcttattcaaatttcaaaagtgccccaggggctagtatctacgacacaccgagcggcgaactaataacgctcactgaagggaactccggttccccgccggcgcgcatgggtgagattccttgaagttgagtattggccgtccgctctaccgaaagttacgggcaccattcaacccggtccagcacggcggccgggtaaccgacttgctgccccgagaattatgcagcatttttttggtgtatgtgggccccaaatgaagtgcaggtcaaaccttgacagtgacgacaaatcgttgggcgggtccagggcgaattttgcgacaacatgtcgaggctcagcaggaccggcatgcaagctagcttactagtgatattctatagtgtcacctaaatgtattctagaccaagcatgcacagctggcgttctcagccagatccaacgttacaccacaatatatcctgccaagatctaattccggggatcggaaatccagaagcccgagaggttgccgcctttcgggctttttctttttcaaaaaaaaaaatttataaaacgatctgttgcggccggccgccgggttgtgggcaaaggcgctcgacggtgggcaaccgcttgcggttgtccacgggcggagccggtgcgcgtagcgcattgtccacaagccaagggcgaccaataattgatatatatattcataattgaaaagctaattgaacatactacttgctgtaactacttgccggagcgaggggtgtttgcaagctgttgatctgaaagggctattagcgttctcacgtgcctttttgattagcgatttcacgtgaccttattagcgatttcacgtactccgattagcgatttcacgtaccctgattagcgatttcacgtggatagtttttggagcgggccggaaagccccgtgaatcaaggctttgcggggcattagcggtttcacgtggataactaccctctatccacaggcttccggggataaaaaagcccgctcgacggcgggctgttggatggggatcgcctgaatcgccccatcatccagccagaaagtgagggagccacggttgatgagagctttgttgtaggtggaccagttggtgattttgaacttttgctttgccacggaacggtctgcgttgtcgggaagatgcgtgatctgatccttcaactcagcaaaagttcgatttattcaacaaagccacgttgtgtctcaaaatctctgatgttacattgcacaagataaaaatatatcatcatgaacaataaaactgtctgcttacataaacagtaatacaaggggtgttatgagggaagcggtgatcgccgaagtatcgactcaactatcagaggtagttggcgtcatcgagcgccatctcgaaccgacgttgctggccgtacatttgtacggctccgcagtggatggcggcctgaagccacacagtgatattgatttgctggttacggtgaccgtaaggcttgatgaaacaacgcggcgagctttgatcaacgaccttttggaaacttcggcttcccctggagagagcgagattctccgcgctgtagaagtcaccattgttgtgcacgacgacatcattccgtggcgttatccagctaagcgcgaactgcaatttggagaatggcagcgcaatgacattcttgcaggtatcttcgagccagccacgatcgacattgatctggctatcttgctgacaaaagcaagagaacatagcgttgccttggtaggtccagcggcggaggaactctttgatccggttcctgaacaggatctatttgaggcgctaaatgaaaccttaacgctatggaactcgccgcccgactgggctggcgatgagcgaaatgtagtgcttacgttgtcccgcatttggtacagcgcagtaaccggcaaaatcgcgccgaaggatgtcgctgccgactgggcaatggagcgcctgccggcccagtatcagcccgtcatacttgaagctaggcaggcttatcttggacaagaagatcgcttggcctcgcgcgcagatcagttggaagaatttgttcactacgtgaaaggcgagatcaccaaggtagtcggcaaataatcactagaccaatgttacacatatatactttagattgatttaaaacttcatttttaatttaaaaggatctaggtgaagatcctttttgataatctcatgaccaaaatcccttaacgtgagttttcgttccactgagcgtcagaccccgtagaaaagatcaaaggatcttcttgagatcctttttttctgcgcgtaatctgctgcttgcaaacaaaaaaaccaccgctaccagcggtggtttgtttgccggatcaagagctaccaactcttcttccgaaggtaactggcttcagcagagcgcagataccaaatactgttcttctagtgtagccgtagttaggccaccacttcaagaactctgtagcaccgcctacatacctcgctctgctaatcctgttaccagtggctgctgccagtggcgataagtcgtgtcttaccgggttggactcaagacgatagttaccggataaggcgcagcggtcgggctgaacggggggttcgtgcacacagcccagcttggagcgaacgacctacaccgaactgagatacctacagcgtgagctatgagaaagcgccacgcttcccgaagggagaaaggcggacaggtatccggtaagcggcagggtcggaacaggagagcgcacgagggagcttccagggggaaacgcctggtatctttatagtcctgtcgggtttcgccacctctgacttgagcgtcgatttttgtgatgctcgtcaggggggcggagcctatggaaaaacgccagcaacgcggcctttttacggttcctggccttttgctggccttttgctcacatgagatctcaaacaaacacatacagcgacttagtttacccgccaatatatcctgtcaaggctcgaactaggctcggacgaagtaagcggccgcaaccttaattaaacacggcgcgccaacagcgatcgcaccaggtacc

SEQ ID NO: 274 - DNA, 7793 bp, synthetic construct
  source 1..7793: mol_type = other DNA; note = pAGS-0004 Ubi.U4 promoter
acctactacgttagagcgctaacgagaatacttcatataccgtattttttacgataataataatgtaatgtgaaattgctatccaaaaggcacctaattttgtccaccgttcaaaggaaaggacaaggaagtagtagcgtgtaggtttggtgctgtacaaaataagcaagacacgtgttgccttattataggataatccataaggcaatttcgtcttaagtcggccattgcacctttaaaaggagcctctttgttcccaaaatcttcaacagtattcagtcgactggtaccaacaggctatggaggacgccaagaacatcaagaagggccccgcccccttctaccccctggaggacggcaccgccggcgagcagctgcacaaggccatgaagcgctacgccctggtgcccggcaccatcgccttcaccgacgcccacatcgaggtggacatcacctacgccgagtacttcgagatgagcgtgcgcctggccgaggccatgaagcgctacggcctgaacaccaaccaccgcatcgtggtgtgcagcgagaacagcctgcagttcttcatgcccgtgctgggcgccctgttcatcggcgtggccgtggcccccgccaacgacatctacaacgagcgcgagctgctgaacagcatgggcatcagccagcccaccgtggtgttcgtgagcaagaagggcctgcagaagatcctgaacgtgcagaagaagctgcccatcatccagaagatcatcatcatggacagcaagaccgactaccagggcttccagagcatgtacaccttcgtgaccagccacctgccccccggcttcaacgagtacgacttcgtgcccgagagcttcgaccgcgacaagaccatcgccctgatcatgaacagcagcggcagcaccggcctgcccaagggcgtggccctgccccaccgcaccgcctgcgtgcgcttcagccacgcccgcgaccccatcttcggcaaccagatcatccccgacaccgccatcctgagcgtggtgcccttccaccacggcttcggcatgttcaccaccctgggctacctgatctgcggcttccgcgtggtgctgatgtaccgcttcgaggaggagctgttcctgcgcagcctgcaggactacaagatccagagcgccctgctggtgcccaccctgttcagcttcttcgccaagagcaccctgatcgacaagtacgacctgagcaacctgcacgagatcgccagcggcggcgcccccctgagcaaggaggtgggcgaggccgtggccaagcgcttccacctgcccggcatccgccagggctacggcctgaccgagaccaccagcgccatcctgatcacccccgagggcgacgacaagcccggcgccgtgggcaaggtggtgcccttcttcgaggccaaggtggtggacctggacaccggcaagaccctgggcgtgaaccagcgcggcgagctgtgcgtgcgcggccccatgatcatgagcggctacgtgaacaaccccgaggccaccaacgccctgatcgacaaggacggctggctgcacagcggcgacatcgcctactgggacgaggacgagcacttcttcatcgtggaccgcctgaagagcctgatcaagtacaagggctaccaggtggcccccgccgagctggagagcatcctgctgcagcaccccaacatcttcgacgccggcgtggccggcctgcccgacgacgacgccggcgagctgcccgccgccgtggtggtgctggagcacggcaagaccatgaccgagaaggagatcgtggactacgtggccagccaggtgaccaccgccaagaagctgcgcggcggcgtggtgttcgtggacgaggtgcccaagggcctgaccggcaagctggacgcccgcaagatccgcgagatcctgatcaaggccaagaagggcggcaagatcgccgtgtcaggtggatcctagataacctttaccttcattccctgtaaattggtaccctgcaaagctttcgttcgtatcatcggtttcgacaacgttcgtcaagttcaatgcatcagtttcattgcgcacacaccagaatcctactgagtttgagtattatggcattgggaaaactgtttttcttgtaccatttgttgtgcttgtaatttactgtgttttttattcggttttcgctatcgaactgtgaaatggaaatggatggagaagagttaatgaatgatatggtccttttgttcattctcaaattaatattatttgttttttctcttatttgttgtgtgttgaatttgaaattataagagatatgcaaacattttgttttgagtaaaaatgtgtcaaatcgtggcctctaatgaccgaagttaatatgaggagtaaaacacttgtagttgtaccattatgcttattcactaggcaacaaatatattttcagacctagaaaagctgcaaatgttactgaatacaagtatgtcctcttgtgttttagacatttatgaactttcctttatgtaattttccagaatccttgtcagattctaatcattgctttataattatagttatactcatggatttgtagttgagtatgaaaatattttttaatgcattttatgacttgccaattgattgacaacatgcatcaatcgactagtcgacgagtcagtaataaacggcgtcaaagtggttgcagccggcacacacgagtcgtgtttatcaactcaaagcacaaatacttttcctcaacctaaaaataaggcaattagccaaaaacaactttgcgtgtaaacaacgctcaatacacgtgtcattttattattagctattgcttcaccgccttagctttctcgtgacctagtcgtcctcgtcttttcttcttcttcttctataaaacaatacccaaagagctcttcttcttcacaattcagatttcaatttctcaaaatcttaaaaactttctctcaattctctctaccgtgatcaaggtaaatttctgtgttccttattctctcaaaatcttcgattttgttttcgttcgatcccaatttcgtatatgttctttggtttagattctgttaatcttagatcgaagacgattttctgggtttgatcgttagatatcatcttaattctcgattagggtttcatagatatcatccgatttgttcaaataatttgagttttgtcgaataattactcttcgatttgtgatttctatctagatctggtgttagtttctagtttgtgcgatcgaatttgtagattaatctgagtttttctgattaacaccacaccaatctggtaccagaaaaggggagaagcaaaaccatgggtaaaaagcctgaactcaccgcgacgtctgtcgagaagtttctgatcgaaaagttcgacagcgtctccgacctgatgcagctctcggagggcgaagaatctcgtgctttcagcttcgatgtaggagggcgtggatatgtcctgcgggtaaatagctgcgccgatggtttctacaaagatcgttatgtttatcggcactttgcatcggccgcgctcccgattccggaagtgcttgacattggggcattcagcgagagcctgacctattgcatctcccgccgtgcacagggtgtcacgttgcaagacctgcctgaaaccgaactgcccgctgttctgcaaccggtcgcggaggcgatggatgccatcgctgcggccgatcttagccagacgagcgggttcggcccattcggaccgcaaggaatcggtcaatacactacatggcgtgatttcatatgcgcgattgctgatccccatgtgtatcactggcaaactgtgatggacgacaccgtcagtgcgtccgtcgcgcaggctctcgatgagctgatgctttgggccgaggactgccccgaagtccggcacctcgtgcacgcggatttcggctccaacaatgtcctgacggacaatggccgcataacagcggtcattgactggagcgaggcgatgttcggggattcccaatacgaggtcgccaacatcttcttctggaggccgtggttggcttgtatggagcagcagacgcgctacttcgagcggaggcatccggagcttgcaggatcgccgcggctccgggcgtatatgctccgcattggtcttgaccaactctatcagagcttggttgacggcaatttcgatgatgcagcttgggcgcagggtcgatgcgacgcaatcgtccgatccggagccgggactgtcgggcgtacacaaatcgcccgcagaagcgcggccgtctggaccgatggctgtgtagaagtactcgccgatagtggaaaccgacgccccagcactcgtccgagggcaaaggaatagatgcatcctgctttaatgagatatgcgagacgcctatgatcgcatgatatttgctttcaattctgttgtgcacgttgtaaaaaacctgagcatgtgtagctcagatccttaccgccggtttcggttcattctaatgaatatatcacccgttactatcgtatttttatgaataatattctccgttcaatttactgattgtaccctactacttatatgtacaatattaaaatgaaaacaatatattgtgctgaataggtttatagcgacatctatgatagagcgccacaataacaaacaattgcgttttattattacaaatccaattttaaaaaaagcggcagaaccggtcaaacctaaaagactgattacataaatcttattcaaatttcaaaagtgccccaggggctagtatctacgacacaccgagcggcgaactaataacgctcactgaagggaactccggttccccgccggcgcgcatgggtgagattccttgaagttgagtattggccgtccgctctaccgaaagttacgggcaccattcaacccggtccagcacggcggccgggtaaccgacttgctgccccgagaattatgcagcatttttttggtgtatgtgggccccaaatgaagtgcaggtcaaaccttgacagtgacgacaaatcgttgggcgggtccagggcgaattttgcgacaacatgtcgaggctcagcaggaccggcatgcaagctagcttactagtgatattctatagtgtcacctaaatgtattctagaccaagcatgcacagctggcgttctcagccagatccaacgttacaccacaatatatcctgccaagatctaattccggggatcggaaatccagaagcccgagaggttgccgcctttcgggctttttctttttcaaaaaaaaaaatttataaaacgatctgttgcggccggccgccgggttgtgggcaaaggcgctcgacggtgggcaaccgcttgcggttgtccacgggcggagccggtgcgcgtagcgcattgtccacaagccaagggcgaccaataattgatatatatattcataattgaaaagctaattgaacatactacttgctgtaactacttgccggagcgaggggtgtttgcaagctgttgatctgaaagggctattagcgttctcacgtgcctttttgattagcgatttcacgtgaccttattagcgatttcacgtactccgattagcgatttcacgtaccctgattagcgatttcacgtggatagtttttggagcgggccggaaagccccgtgaatcaaggctttgcggggcattagcggtttcacgtggataactaccctctatccacaggcttccggggataaaaaagcccgctcgacggcgggctgttggatggggatcgcctgaatcgccccatcatccagccagaaagtgagggagccacggttgatgagagctttgttgtaggtggaccagttggtgattttgaacttttgctttgccacggaacggtctgcgttgtcgggaagatgcgtgatctgatccttcaactcagcaaaagttcgatttattcaacaaagccacgttgtgtctcaaaatctctgatgttacattgcacaagataaaaatatatcatcatgaacaataaaactgtctgcttacataaacagtaatacaaggggtgttatgagggaagcggtgatcgccgaagtatcgactcaactatcagaggtagttggcgtcatcgagcgccatctcgaaccgacgttgctggccgtacatttgtacggctccgcagtggatggcggcctgaagccacacagtgatattgatttgctggttacggtgaccgtaaggcttgatgaaacaacgcggcgagctttgatcaacgaccttttggaaacttcggcttcccctggagagagcgagattctccgcgctgtagaagtcaccattgttgtgcacgacgacatcattccgtggcgttatccagctaagcgcgaactgcaatttggagaatggcagcgcaatgacattcttgcaggtatcttcgagccagccacgatcgacattgatctggctatcttgctgacaaaagcaagagaacatagcgttgccttggtaggtccagcggcggaggaactctttgatccggttcctgaacaggatctatttgaggcgctaaatgaaaccttaacgctatggaactcgccgcccgactgggctggcgatgagcgaaatgtagtgcttacgttgtcccgcatttggtacagcgcagtaaccggcaaaatcgcgccgaaggatgtcgctgccgactgggcaatggagcgcctgccggcccagtatcagcccgtcatacttgaagctaggcaggcttatcttggacaagaagatcgcttggcctcgcgcgcagatcagttggaagaatttgttcactacgtgaaaggcgagatcaccaaggtagtcggcaaataatcactagaccaatgttacacatatatactttagattgatttaaaacttcatttttaatttaaaaggatctaggtgaagatcctttttgataatctcatgaccaaaatcccttaacgtgagttttcgttccactgagcgtcagaccccgtagaaaagatcaaaggatcttcttgagatcctttttttctgcgcgtaatctgctgcttgcaaacaaaaaaaccaccgctaccagcggtggtttgtttgccggatcaagagctaccaactcttcttccgaaggtaactggcttcagcagagcgcagataccaaatactgttcttctagtgtagccgtagttaggccaccacttcaagaactctgtagcaccgcctacatacctcgctctgctaatcctgttaccagtggctgctgccagtggcgataagtcgtgtcttaccgggttggactcaagacgatagttaccggataaggcgcagcggtcgggctgaacggggggttcgtgcacacagcccagcttggagcgaacgacctacaccgaactgagatacctacagcgtgagctatgagaaagcgccacgcttcccgaagggagaaaggcggacaggtatccggtaagcggcagggtcggaacaggagagcgcacgagggagcttccagggggaaacgcctggtatctttatagtcctgtcgggtttcgccacctctgacttgagcgtcgatttttgtgatgctcgtcaggggggcggagcctatggaaaaacgccagcaacgcggcctttttacggttcctggccttttgctggccttttgctcacatgagatctcaaacaaacacatacagcgacttagtttacccgccaatatatcctgtcaaggctcgaactaggctcggacgaagtaagcggccgcaaccttaattaaacacggcgcgccaacagcgatcgcaccaggtacc

SEQ ID NO: 275 - DNA, 7928 bp, synthetic construct
  source 1..7928: mol_type = other DNA; note = pAGS-0005 CAM 35s promoter
acctcctactccaaaaatgtcaaagatacagtctcagaagaccaaagggctattgagacttttcaacaaagggtaatatcgggaaacctcctcggattccattgcccagctatctgtcacttcatcaaaaggacagtagaaaaggaaggtggcacctacaaatgccatcattgcgataaaggaaaggctatcgttcaagatgcccctgccgacagtggtcccaaagatggacccccacccacgaggagcatcgtggaaaaagaagacgttccaaccacgtcttcaaagcaagtggattgatgtgatatctccactgacgtaagggatgacgcacaatcccactatccttcgcaagacccttcctctatataaggaagttcatttcatttggagaggacagccaacagtattcagtcgactggtaccaacaggctatggaggacgccaagaacatcaagaagggccccgcccccttctaccccctggaggacggcaccgccggcgagcagctgcacaaggccatgaagcgctacgccctggtgcccggcaccatcgccttcaccgacgcccacatcgaggtggacatcacctacgccgagtacttcgagatgagcgtgcgcctggccgaggccatgaagcgctacggcctgaacaccaaccaccgcatcgtggtgtgcagcgagaacagcctgcagttcttcatgcccgtgctgggcgccctgttcatcggcgtggccgtggcccccgccaacgacatctacaacgagcgcgagctgctgaacagcatgggcatcagccagcccaccgtggtgttcgtgagcaagaagggcctgcagaagatcctgaacgtgcagaagaagctgcccatcatccagaagatcatcatcatggacagcaagaccgactaccagggcttccagagcatgtacaccttcgtgaccagccacctgccccccggcttcaacgagtacgacttcgtgcccgagagcttcgaccgcgacaagaccatcgccctgatcatgaacagcagcggcagcaccggcctgcccaagggcgtggccctgccccaccgcaccgcctgcgtgcgcttcagccacgcccgcgaccccatcttcggcaaccagatcatccccgacaccgccatcctgagcgtggtgcccttccaccacggcttcggcatgttcaccaccctgggctacctgatctgcggcttccgcgtggtgctgatgtaccgcttcgaggaggagctgttcctgcgcagcctgcaggactacaagatccagagcgccctgctggtgcccaccctgttcagcttcttcgccaagagcaccctgatcgacaagtacgacctgagcaacctgcacgagatcgccagcggcggcgcccccctgagcaaggaggtgggcgaggccgtggccaagcgcttccacctgcccggcatccgccagggctacggcctgaccgagaccaccagcgccatcctgatcacccccgagggcgacgacaagcccggcgccgtgggcaaggtggtgcccttcttcgaggccaaggtggtggacctggacaccggcaagaccctgggcgtgaaccagcgcggcgagctgtgcgtgcgcggccccatgatcatgagcggctacgtgaacaaccccgaggccaccaacgccctgatcgacaaggacggctggctgcacagcggcgacatcgcctactgggacgaggacgagcacttcttcatcgtggaccgcctgaagagcctgatcaagtacaagggctaccaggtggcccccgccgagctggagagcatcctgctgcagcaccccaacatcttcgacgccggcgtggccggcctgcccgacgacgacgccggcgagctgcccgccgccgtggtggtgctggagcacggcaagaccatgaccgagaaggagatcgtggactacgtggccagccaggtgaccaccgccaagaagctgcgcggcggcgtggtgttcgtggacgaggtgcccaagggcctgaccggcaagctggacgcccgcaagatccgcgagatcctgatcaaggccaagaagggcggcaagatcgccgtgtcaggtggatcctagataacctttaccttcattccctgtaaattggtaccctgcaaagctttcgttcgtatcatcggtttcgacaacgttcgtcaagttcaatgcatcagtttcattgcgcacacaccagaatcctactgagtttgagtattatggcattgggaaaactgtttttcttgtaccatttgttgtgcttgtaatttactgtgttttttattcggttttcgctatcgaactgtgaaatggaaatggatggagaagagttaatgaatgatatggtccttttgttcattctcaaattaatattatttgttttttctcttatttgttgtgtgttgaatttgaaattataagagatatgcaaacattttgttttgagtaaaaatgtgtcaaatcgtggcctctaatgaccgaagttaatatgaggagtaaaacacttgtagttgtaccattatgcttattcactaggcaacaaatatattttcagacctagaaaagctgcaaatgttactgaatacaagtatgtcctcttgtgttttagacatttatgaactttcctttatgtaattttccagaatccttgtcagattctaatcattgctttataattatagttatactcatggatttgtagttgagtatgaaaatattttttaatgcattttatgacttgccaattgattgacaacatgcatcaatcgactagtcgacgagtcagtaataaacggcgtcaaagtggttgcagccggcacacacgagtcgtgtttatcaactcaaagcacaaatacttttcctcaacctaaaaataaggcaattagccaaaaacaactttgcgtgtaaacaacgctcaatacacgtgtcattttattattagctattgcttcaccgccttagctttctcgtgacctagtcgtcctcgtcttttcttcttcttcttctataaaacaatacccaaagagctcttcttcttcacaattcagatttcaatttctcaaaatcttaaaaactttctctcaattctctctaccgtgatcaaggtaaatttctgtgttccttattctctcaaaatcttcgattttgttttcgttcgatcccaatttcgtatatgttctttggtttagattctgttaatcttagatcgaagacgattttctgggtttgatcgttagatatcatcttaattctcgattagggtttcatagatatcatccgatttgttcaaataatttgagttttgtcgaataattactcttcgatttgtgatttctatctagatctggtgttagtttctagtttgtgcgatcgaatttgtagattaatctgagtttttctgattaacaccacaccaatctggtaccagaaaaggggagaagcaaaaccatgggtaaaaagcctgaactcaccgcgacgtctgtcgagaagtttctgatcgaaaagttcgacagcgtctccgacctgatgcagctctcggagggcgaagaatctcgtgctttcagcttcgatgtaggagggcgtggatatgtcctgcgggtaaatagctgcgccgatggtttctacaaagatcgttatgtttatcggcactttgcatcggccgcgctcccgattccggaagtgcttgacattggggcattcagcgagagcctgacctattgcatctcccgccgtgcacagggtgtcacgttgcaagacctgcctgaaaccgaactgcccgctgttctgcaaccggtcgcggaggcgatggatgccatcgctgcggccgatcttagccagacgagcgggttcggcccattcggaccgcaaggaatcggtcaatacactacatggcgtgatttcatatgcgcgattgctgatccccatgtgtatcactggcaaactgtgatggacgacaccgtcagtgcgtccgtcgcgcaggctctcgatgagctgatgctttgggccgaggactgccccgaagtccggcacctcgtgcacgcggatttcggctccaacaatgtcctgacggacaatggccgcataacagcggtcattgactggagcgaggcgatgttcggggattcccaatacgaggtcgccaacatcttcttctggaggccgtggttggcttgtatggagcagcagacgcgctacttcgagcggaggcatccggagcttgcaggatcgccgcggctccgggcgtatatgctccgcattggtcttgaccaactctatcagagcttggttgacggcaatttcgatgatgcagcttgggcgcagggtcgatgcgacgcaatcgtccgatccggagccgggactgtcgggcgtacacaaatcgcccgcagaagcgcggccgtctggaccgatggctgtgtagaagtactcgccgatagtggaaaccgacgccccagcactcgtccgagggcaaaggaatagatgcatcctgctttaatgagatatgcgagacgcctatgatcgcatgatatttgctttcaattctgttgtgcacgttgtaaaaaacctgagcatgtgtagctcagatccttaccgccggtttcggttcattctaatgaatatatcacccgttactatcgtatttttatgaataatattctccgttcaatttactgattgtaccctactacttatatgtacaatattaaaatgaaaacaatatattgtgctgaataggtttatagcgacatctatgatagagcgccacaataacaaacaattgcgttttattattacaaatccaattttaaaaaaagcggcagaaccggtcaaacctaaaagactgattacataaatcttattcaaatttcaaaagtgccccaggggctagtatctacgacacaccgagcggcgaactaataacgctcactgaagggaactccggttccccgccggcgcgcatgggtgagattccttgaagttgagtattggccgtccgctctaccgaaagttacgggcaccattcaacccggtccagcacggcggccgggtaaccgacttgctgccccgagaattatgcagcatttttttggtgtatgtgggccccaaatgaagtgcaggtcaaaccttgacagtgacgacaaatcgttgggcgggtccagggcgaattttgcgacaacatgtcgaggctcagcaggaccggcatgcaagctagcttactagtgatattctatagtgtcacctaaatgtattctagaccaagcatgcacagctggcgttctcagccagatccaacgttacaccacaatatatcctgccaagatctaattccggggatcggaaatccagaagcccgagaggttgccgcctttcgggctttttctttttcaaaaaaaaaaatttataaaacgatctgttgcggccggccgccgggttgtgggcaaaggcgctcgacggtgggcaaccgcttgcggttgtccacgggcggagccggtgcgcgtagcgcattgtccacaagccaagggcgaccaataattgatatatatattcataattgaaaagctaattgaacatactacttgctgtaactacttgccggagcgaggggtgtttgcaagctgttgatctgaaagggctattagcgttctcacgtgcctttttgattagcgatttcacgtgaccttattagcgatttcacgtactccgattagcgatttcacgtaccctgattagcgatttcacgtggatagtttttggagcgggccggaaagccccgtgaatcaaggctttgcggggcattagcggtttcacgtggataactaccctctatccacaggcttccggggataaaaaagcccgctcgacggcgggctgttggatggggatcgcctgaatcgccccatcatccagccagaaagtgagggagccacggttgatgagagctttgttgtaggtggaccagttggtgattttgaacttttgctttgccacggaacggtctgcgttgtcgggaagatgcgtgatctgatccttcaactcagcaaaagttcgatttattcaacaaagccacgttgtgtctcaaaatctctgatgttacattgcacaagataaaaatatatcatcatgaacaataaaactgtctgcttacataaacagtaatacaaggggtgttatgagggaagcggtgatcgccgaagtatcgactcaactatcagaggtagttggcgtcatcgagcgccatctcgaaccgacgttgctggccgtacatttgtacggctccgcagtggatggcggcctgaagccacacagtgatattgatttgctggttacggtgaccgtaaggcttgatgaaacaacgcggcgagctttgatcaacgaccttttggaaacttcggcttcccctggagagagcgagattctccgcgctgtagaagtcaccattgttgtgcacgacgacatcattccgtggcgttatccagctaagcgcgaactgcaatttggagaatggcagcgcaatgacattcttgcaggtatcttcgagccagccacgatcgacattgatctggctatcttgctgacaaaagcaagagaacatagcgttgccttggtaggtccagcggcggaggaactctttgatccggttcctgaacaggatctatttgaggcgctaaatgaaaccttaacgctatggaactcgccgcccgactgggctggcgatgagcgaaatgtagtgcttacgttgtcccgcatttggtacagcgcagtaaccggcaaaatcgcgccgaaggatgtcgctgccgactgggcaatggagcgcctgccggcccagtatcagcccgtcatacttgaagctaggcaggcttatcttggacaagaagatcgcttggcctcgcgcgcagatcagttggaagaatttgttcactacgtgaaaggcgagatcaccaaggtagtcggcaaataatcactagaccaatgttacacatatatactttagattgatttaaaacttcatttttaatttaaaaggatctaggtgaagatcctttttgataatctcatgaccaaaatcccttaacgtgagttttcgttccactgagcgtcagaccccgtagaaaagatcaaaggatcttcttgagatcctttttttctgcgcgtaatctgctgcttgcaaacaaaaaaaccaccgctaccagcggtggtttgtttgccggatcaagagctaccaactcttcttccgaaggtaactggcttcagcagagcgcagataccaaatactgttcttctagtgtagccgtagttaggccaccacttcaagaactctgtagcaccgcctacatacctcgctctgctaatcctgttaccagtggctgctgccagtggcgataagtcgtgtcttaccgggttggactcaagacgatagttaccggataaggcgcagcggtcgggctgaacggggggttcgtgcacacagcccagcttggagcgaacgacctacaccgaactgagatacctacagcgtgagctatgagaaagcgccacgcttcccgaagggagaaaggcggacaggtatccggtaagcggcagggtcggaacaggagagcgcacgagggagcttccagggggaaacgcctggtatctttatagtcctgtcgggtttcgccacctctgacttgagcgtcgatttttgtgatgctcgtcaggggggcggagcctatggaaaaacgccagcaacgcggcctttttacggttcctggccttttgctggccttttgctcacatgagatctcaaacaaacacatacagcgacttagtttacccgccaatatatcctgtcaaggctcgaactaggctcggacgaagtaagcggccgcaaccttaattaaacacggcgcgccaacagcgatcgcaccaggtacc

SEQ ID NO: 276 - DNA, 7954 bp, synthetic construct
  source 1..7954: mol_type = other DNA; note = pAGS-0006 MAS promoter
acctgtgtaatgtattggtaatttgggaagatataataggaagcaaggctatttatccatttctgaaaaggcgaaatggcgtcaccgcgagcgtcacgcgcattccgttcttgctgtaaagcgttgtttggtacacttttgactagcgaggcttggcgtgtcagcgtatctattcaaaagtcgttaatggctgcggatcaagaaaaagttggaatagaaacagaatacccgcgaaattcaggcccggttgccatgtcctacacgccgaaataaacgaccaaattagtagaaaaataaaaactgactcggatacttacgtcacgtcttgcgcactgatttgaaaaatctcaatataaacaaagacggccacaagaaaaaaccaaaacaccgatattcattaatcttatctagtttctcaaaaaaatcataacagtattcagtcgactggtaccaacaggctatggaggacgccaagaacatcaagaagggccccgcccccttctaccccctggaggacggcaccgccggcgagcagctgcacaaggccatgaagcgctacgccctggtgcccggcaccatcgccttcaccgacgcccacatcgaggtggacatcacctacgccgagtacttcgagatgagcgtgcgcctggccgaggccatgaagcgctacggcctgaacaccaaccaccgcatcgtggtgtgcagcgagaacagcctgcagttcttcatgcccgtgctgggcgccctgttcatcggcgtggccgtggcccccgccaacgacatctacaacgagcgcgagctgctgaacagcatgggcatcagccagcccaccgtggtgttcgtgagcaagaagggcctgcagaagatcctgaacgtgcagaagaagctgcccatcatccagaagatcatcatcatggacagcaagaccgactaccagggcttccagagcatgtacaccttcgtgaccagccacctgccccccggcttcaacgagtacgacttcgtgcccgagagcttcgaccgcgacaagaccatcgccctgatcatgaacagcagcggcagcaccggcctgcccaagggcgtggccctgccccaccgcaccgcctgcgtgcgcttcagccacgcccgcgaccccatcttcggcaaccagatcatccccgacaccgccatcctgagcgtggtgcccttccaccacggcttcggcatgttcaccaccctgggctacctgatctgcggcttccgcgtggtgctgatgtaccgcttcgaggaggagctgttcctgcgcagcctgcaggactacaagatccagagcgccctgctggtgcccaccctgttcagcttcttcgccaagagcaccctgatcgacaagtacgacctgagcaacctgcacgagatcgccagcggcggcgcccccctgagcaaggaggtgggcgaggccgtggccaagcgcttccacctgcccggcatccgccagggctacggcctgaccgagaccaccagcgccatcctgatcacccccgagggcgacgacaagcccggcgccgtgggcaaggtggtgcccttcttcgaggccaaggtggtggacctggacaccggcaagaccctgggcgtgaaccagcgcggcgagctgtgcgtgcgcggccccatgatcatgagcggctacgtgaacaaccccgaggccaccaacgccctgatcgacaaggacggctggctgcacagcggcgacatcgcctactgggacgaggacgagcacttcttcatcgtggaccgcctgaagagcctgatcaagtacaagggctaccaggtggcccccgccgagctggagagcatcctgctgcagcaccccaacatcttcgacgccggcgtggccggcctgcccgacgacgacgccggcgagctgcccgccgccgtggtggtgctggagcacggcaagaccatgaccgagaaggagatcgtggactacgtggccagccaggtgaccaccgccaagaagctgcgcggcggcgtggtgttcgtggacgaggtgcccaagggcctgaccggcaagctggacgcccgcaagatccgcgagatcctgatcaaggccaagaagggcggcaagatcgccgtgtcaggtggatcctagataacctttaccttcattccctgtaaattggtaccctgcaaagctttcgttcgtatcatcggtttcgacaacgttcgtcaagttcaatgcatcagtttcattgcgcacacaccagaatcctactgagtttgagtattatggcattgggaaaactgtttttcttgtaccatttgttgtgcttgtaatttactgtgttttttattcggttttcgctatcgaactgtgaaatggaaatggatggagaagagttaatgaatgatatggtccttttgttcattctcaaattaatattatttgttttttctcttatttgttgtgtgttgaatttgaaattataagagatatgcaaacattttgttttgagtaaaaatgtgtcaaatcgtggcctctaatgaccgaagttaatatgaggagtaaaacacttgtagttgtaccattatgcttattcactaggcaacaaatatattttcagacctagaaaagctgcaaatgttactgaatacaagtatgtcctcttgtgttttagacatttatgaactttcctttatgtaattttccagaatccttgtcagattctaatcattgctttataattatagttatactcatggatttgtagttgagtatgaaaatattttttaatgcattttatgacttgccaattgattgacaacatgcatcaatcgactagtcgacgagtcagtaataaacggcgtcaaagtggttgcagccggcacacacgagtcgtgtttatcaactcaaagcacaaatacttttcctcaacctaaaaataaggcaattagccaaaaacaactttgcgtgtaaacaacgctcaatacacgtgtcattttattattagctattgcttcaccgccttagctttctcgtgacctagtcgtcctcgtcttttcttcttcttcttctataaaacaatacccaaagagctcttcttcttcacaattcagatttcaatttctcaaaatcttaaaaactttctctcaattctctctaccgtgatcaaggtaaatttctgtgttccttattctctcaaaatcttcgattttgttttcgttcgatcccaatttcgtatatgttctttggtttagattctgttaatcttagatcgaagacgattttctgggtttgatcgttagatatcatcttaattctcgattagggtttcatagatatcatccgatttgttcaaataatttgagttttgtcgaataattactcttcgatttgtgatttctatctagatctggtgttagtttctagtttgtgcgatcgaatttgtagattaatctgagtttttctgattaacaccacaccaatctggtaccagaaaaggggagaagcaaaaccatgggtaaaaagcctgaactcaccgcgacgtctgtcgagaagtttctgatcgaaaagttcgacagcgtctccgacctgatgcagctctcggagggcgaagaatctcgtgctttcagcttcgatgtaggagggcgtggatatgtcctgcgggtaaatagctgcgccgatggtttctacaaagatcgttatgtttatcggcactttgcatcggccgcgctcccgattccggaagtgcttgacattggggcattcagcgagagcctgacctattgcatctcccgccgtgcacagggtgtcacgttgcaagacctgcctgaaaccgaactgcccgctgttctgcaaccggtcgcggaggcgatggatgccatcgctgcggccgatcttagccagacgagcgggttcggcccattcggaccgcaaggaatcggtcaatacactacatggcgtgatttcatatgcgcgattgctgatccccatgtgtatcactggcaaactgtgatggacgacaccgtcagtgcgtccgtcgcgcaggctctcgatgagctgatgctttgggccgaggactgccccgaagtccggcacctcgtgcacgcggatttcggctccaacaatgtcctgacggacaatggccgcataacagcggtcattgactggagcgaggcgatgttcggggattcccaatacgaggtcgccaacatcttcttctggaggccgtggttggcttgtatggagcagcagacgcgctacttcgagcggaggcatccggagcttgcaggatcgccgcggctccgggcgtatatgctccgcattggtcttgaccaactctatcagagcttggttgacggcaatttcgatgatgcagcttgggcgcagggtcgatgcgacgcaatcgtccgatccggagccgggactgtcgggcgtacacaaatcgcccgcagaagcgcggccgtctggaccgatggctgtgtagaagtactcgccgatagtggaaaccgacgccccagcactcgtccgagggcaaaggaatagatgcatcctgctttaatgagatatgcgagacgcctatgatcgcatgatatttgctttcaattctgttgtgcacgttgtaaaaaacctgagcatgtgtagctcagatccttaccgccggtttcggttcattctaatgaatatatcacccgttactatcgtatttttatgaataatattctccgttcaatttactgattgtaccctactacttatatgtacaatattaaaatgaaaacaatatattgtgctgaataggtttatagcgacatctatgatagagcgccacaataacaaacaattgcgttttattattacaaatccaattttaaaaaaagcggcagaaccggtcaaacctaaaagactgattacataaatcttattcaaatttcaaaagtgccccaggggctagtatctacgacacaccgagcggcgaactaataacgctcactgaagggaactccggttccccgccggcgcgcatgggtgagattccttgaagttgagtattggccgtccgctctaccgaaagttacgggcaccattcaacccggtccagcacggcggccgggtaaccgacttgctgccccgagaattatgcagcatttttttggtgtatgtgggccccaaatgaagtgcaggtcaaaccttgacagtgacgacaaatcgttgggcgggtccagggcgaattttgcgacaacatgtcgaggctcagcaggaccggcatgcaagctagcttactagtgatattctatagtgtcacctaaatgtattctagaccaagcatgcacagctggcgttctcagccagatccaacgttacaccacaatatatcctgccaagatctaattccggggatcggaaatccagaagcccgagaggttgccgcctttcgggctttttctttttcaaaaaaaaaaatttataaaacgatctgttgcggccggccgccgggttgtgggcaaaggcgctcgacggtgggcaaccgcttgcggttgtccacgggcggagccggtgcgcgtagcgcattgtccacaagccaagggcgaccaataattgatatatatattcataattgaaaagctaattgaacatactacttgctgtaactacttgccggagcgaggggtgtttgcaagctgttgatctgaaagggctattagcgttctcacgtgcctttttgattagcgatttcacgtgaccttattagcgatttcacgtactccgattagcgatttcacgtaccctgattagcgatttcacgtggatagtttttggagcgggccggaaagccccgtgaatcaaggctttgcggggcattagcggtttcacgtggataactaccctctatccacaggcttccggggataaaaaagcccgctcgacggcgggctgttggatggggatcgcctgaatcgccccatcatccagccagaaagtgagggagccacggttgatgagagctttgttgtaggtggaccagttggtgattttgaacttttgctttgccacggaacggtctgcgttgtcgggaagatgcgtgatctgatccttcaactcagcaaaagttcgatttattcaacaaagccacgttgtgtctcaaaatctctgatgttacattgcacaagataaaaatatatcatcatgaacaataaaactgtctgcttacataaacagtaatacaaggggtgttatgagggaagcggtgatcgccgaagtatcgactcaactatcagaggtagttggcgtcatcgagcgccatctcgaaccgacgttgctggccgtacatttgtacggctccgcagtggatggcggcctgaagccacacagtgatattgatttgctggttacggtgaccgtaaggcttgatgaaacaacgcggcgagctttgatcaacgaccttttggaaacttcggcttcccctggagagagcgagattctccgcgctgtagaagtcaccattgttgtgcacgacgacatcattccgtggcgttatccagctaagcgcgaactgcaatttggagaatggcagcgcaatgacattcttgcaggtatcttcgagccagccacgatcgacattgatctggctatcttgctgacaaaagcaagagaacatagcgttgccttggtaggtccagcggcggaggaactctttgatccggttcctgaacaggatctatttgaggcgctaaatgaaaccttaacgctatggaactcgccgcccgactgggctggcgatgagcgaaatgtagtgcttacgttgtcccgcatttggtacagcgcagtaaccggcaaaatcgcgccgaaggatgtcgctgccgactgggcaatggagcgcctgccggcccagtatcagcccgtcatacttgaagctaggcaggcttatcttggacaagaagatcgcttggcctcgcgcgcagatcagttggaagaatttgttcactacgtgaaaggcgagatcaccaaggtagtcggcaaataatcactagaccaatgttacacatatatactttagattgatttaaaacttcatttttaatttaaaaggatctaggtgaagatcctttttgataatctcatgaccaaaatcccttaacgtgagttttcgttccactgagcgtcagaccccgtagaaaagatcaaaggatcttcttgagatcctttttttctgcgcgtaatctgctgcttgcaaacaaaaaaaccaccgctaccagcggtggtttgtttgccggatcaagagctaccaactcttcttccgaaggtaactggcttcagcagagcgcagataccaaatactgttcttctagtgtagccgtagttaggccaccacttcaagaactctgtagcaccgcctacatacctcgctctgctaatcctgttaccagtggctgctgccagtggcgataagtcgtgtcttaccgggttggactcaagacgatagttaccggataaggcgcagcggtcgggctgaacggggggttcgtgcacacagcccagcttggagcgaacgacctacaccgaactgagatacctacagcgtgagctatgagaaagcgccacgcttcccgaagggagaaaggcggacaggtatccggtaagcggcagggtcggaacaggagagcgcacgagggagcttccagggggaaacgcctggtatctttatagtcctgtcgggtttcgccacctctgacttgagcgtcgatttttgtgatgctcgtcaggggggcggagcctatggaaaaacgccagcaacgcggcctttttacggttcctggccttttgctggccttttgctcacatgagatctcaaacaaacacatacagcgacttagtttacccgccaatatatcctgtcaaggctcgaactaggctcggacgaagtaagcggccgcaaccttaattaaacacggcgcgccaacagcgatcgcaccaggtacc

SEQ ID NO: 277 - DNA, 8023 bp, synthetic construct
  source 1..8023: mol_type = other DNA; note = pAGS-0007 PAR promoter
acctgctgaggcttgacatgattggtgcgtatgtttgtatgaagctacaggactgatttggcgggctatgagggcgggggaagctctggaagggccgcgatggggcgcgcggcgtccagaaggcgccatacggcccgctggcggcacccatccggtataaaagcccgcgaccccgaacggtgacctccactttcagcgacaaacgagcacttatacatacgcgactattctgccgctatacataaccactcagctagcttaagatcccatcaagcttgcatgccgggcgcgccagaaggagcgcagccaaaccaggatgatgtttgatggggtatttgagcacttgcaacccttatccggaagccccctggcccacaaaggctaggcgccaatgcaagcagttcgcatgcagcccctggagcggtgccctcctgataaaccggccagggggcctatgttctttacttttttacaagagaagtcactcaacatcttaaaacagtattcagtcgactggtaccaacaggctatggaggacgccaagaacatcaagaagggccccgcccccttctaccccctggaggacggcaccgccggcgagcagctgcacaaggccatgaagcgctacgccctggtgcccggcaccatcgccttcaccgacgcccacatcgaggtggacatcacctacgccgagtacttcgagatgagcgtgcgcctggccgaggccatgaagcgctacggcctgaacaccaaccaccgcatcgtggtgtgcagcgagaacagcctgcagttcttcatgcccgtgctgggcgccctgttcatcggcgtggccgtggcccccgccaacgacatctacaacgagcgcgagctgctgaacagcatgggcatcagccagcccaccgtggtgttcgtgagcaagaagggcctgcagaagatcctgaacgtgcagaagaagctgcccatcatccagaagatcatcatcatggacagcaagaccgactaccagggcttccagagcatgtacaccttcgtgaccagccacctgccccccggcttcaacgagtacgacttcgtgcccgagagcttcgaccgcgacaagaccatcgccctgatcatgaacagcagcggcagcaccggcctgcccaagggcgtggccctgccccaccgcaccgcctgcgtgcgcttcagccacgcccgcgaccccatcttcggcaaccagatcatccccgacaccgccatcctgagcgtggtgcccttccaccacggcttcggcatgttcaccaccctgggctacctgatctgcggcttccgcgtggtgctgatgtaccgcttcgaggaggagctgttcctgcgcagcctgcaggactacaagatccagagcgccctgctggtgcccaccctgttcagcttcttcgccaagagcaccctgatcgacaagtacgacctgagcaacctgcacgagatcgccagcggcggcgcccccctgagcaaggaggtgggcgaggccgtggccaagcgcttccacctgcccggcatccgccagggctacggcctgaccgagaccaccagcgccatcctgatcacccccgagggcgacgacaagcccggcgccgtgggcaaggtggtgcccttcttcgaggccaaggtggtggacctggacaccggcaagaccctgggcgtgaaccagcgcggcgagctgtgcgtgcgcggccccatgatcatgagcggctacgtgaacaaccccgaggccaccaacgccctgatcgacaaggacggctggctgcacagcggcgacatcgcctactgggacgaggacgagcacttcttcatcgtggaccgcctgaagagcctgatcaagtacaagggctaccaggtggcccccgccgagctggagagcatcctgctgcagcaccccaacatcttcgacgccggcgtggccggcctgcccgacgacgacgccggcgagctgcccgccgccgtggtggtgctggagcacggcaagaccatgaccgagaaggagatcgtggactacgtggccagccaggtgaccaccgccaagaagctgcgcggcggcgtggtgttcgtggacgaggtgcccaagggcctgaccggcaagctggacgcccgcaagatccgcgagatcctgatcaaggccaagaagggcggcaagatcgccgtgtcaggtggatcctagataacctttaccttcattccctgtaaattggtaccctgcaaagctttcgttcgtatcatcggtttcgacaacgttcgtcaagttcaatgcatcagtttcattgcgcacacaccagaatcctactgagtttgagtattatggcattgggaaaactgtttttcttgtaccatttgttgtgcttgtaatttactgtgttttttattcggttttcgctatcgaactgtgaaatggaaatggatggagaagagttaatgaatgatatggtccttttgttcattctcaaattaatattatttgttttttctcttatttgttgtgtgttgaatttgaaattataagagatatgcaaacattttgttttgagtaaaaatgtgtcaaatcgtggcctctaatgaccgaagttaatatgaggagtaaaacacttgtagttgtaccattatgcttattcactaggcaacaaatatattttcagacctagaaaagctgcaaatgttactgaatacaagtatgtcctcttgtgttttagacatttatgaactttcctttatgtaattttccagaatccttgtcagattctaatcattgctttataattatagttatactcatggatttgtagttgagtatgaaaatattttttaatgcattttatgacttgccaattgattgacaacatgcatcaatcgactagtcgacgagtcagtaataaacggcgtcaaagtggttgcagccggcacacacgagtcgtgtttatcaactcaaagcacaaatacttttcctcaacctaaaaataaggcaattagccaaaaacaactttgcgtgtaaacaacgctcaatacacgtgtcattttattattagctattgcttcaccgccttagctttctcgtgacctagtcgtcctcgtcttttcttcttcttcttctataaaacaatacccaaagagctcttcttcttcacaattcagatttcaatttctcaaaatcttaaaaactttctctcaattctctctaccgtgatcaaggtaaatttctgtgttccttattctctcaaaatcttcgattttgttttcgttcgatcccaatttcgtatatgttctttggtttagattctgttaatcttagatcgaagacgattttctgggtttgatcgttagatatcatcttaattctcgattagggtttcatagatatcatccgatttgttcaaataatttgagttttgtcgaataattactcttcgatttgtgatttctatctagatctggtgttagtttctagtttgtgcgatcgaatttgtagattaatctgagtttttctgattaacaccacaccaatctggtaccagaaaaggggagaagcaaaaccatgggtaaaaagcctgaactcaccgcgacgtctgtcgagaagtttctgatcgaaaagttcgacagcgtctccgacctgatgcagctctcggagggcgaagaatctcgtgctttcagcttcgatgtaggagggcgtggatatgtcctgcgggtaaatagctgcgccgatggtttctacaaagatcgttatgtttatcggcactttgcatcggccgcgctcccgattccggaagtgcttgacattggggcattcagcgagagcctgacctattgcatctcccgccgtgcacagggtgtcacgttgcaagacctgcctgaaaccgaactgcccgctgttctgcaaccggtcgcggaggcgatggatgccatcgctgcggccgatcttagccagacgagcgggttcggcccattcggaccgcaaggaatcggtcaatacactacatggcgtgatttcatatgcgcgattgctgatccccatgtgtatcactggcaaactgtgatggacgacaccgtcagtgcgtccgtcgcgcaggctctcgatgagctgatgctttgggccgaggactgccccgaagtccggcacctcgtgcacgcggatttcggctccaacaatgtcctgacggacaatggccgcataacagcggtcattgactggagcgaggcgatgttcggggattcccaatacgaggtcgccaacatcttcttctggaggccgtggttggcttgtatggagcagcagacgcgctacttcgagcggaggcatccggagcttgcaggatcgccgcggctccgggcgtatatgctccgcattggtcttgaccaactctatcagagcttggttgacggcaatttcgatgatgcagcttgggcgcagggtcgatgcgacgcaatcgtccgatccggagccgggactgtcgggcgtacacaaatcgcccgcagaagcgcggccgtctggaccgatggctgtgtagaagtactcgccgatagtggaaaccgacgccccagcactcgtccgagggcaaaggaatagatgcatcctgctttaatgagatatgcgagacgcctatgatcgcatgatatttgctttcaattctgttgtgcacgttgtaaaaaacctgagcatgtgtagctcagatccttaccgccggtttcggttcattctaatgaatatatcacccgttactatcgtatttttatgaataatattctccgttcaatttactgattgtaccctactacttatatgtacaatattaaaatgaaaacaatatattgtgctgaataggtttatagcgacatctatgatagagcgccacaataacaaacaattgcgttttattattacaaatccaattttaaaaaaagcggcagaaccggtcaaacctaaaagactgattacataaatcttattcaaatttcaaaagtgccccaggggctagtatctacgacacaccgagcggcgaactaataacgctcactgaagggaactccggttccccgccggcgcgcatgggtgagattccttgaagttgagtattggccgtccgctctaccgaaagttacgggcaccattcaacccggtccagcacggcggccgggtaaccgacttgctgccccgagaattatgcagcatttttttggtgtatgtgggccccaaatgaagtgcaggtcaaaccttgacagtgacgacaaatcgttgggcgggtccagggcgaattttgcgacaacatgtcgaggctcagcaggaccggcatgcaagctagcttactagtgatattctatagtgtcacctaaatgtattctagaccaagcatgcacagctggcgttctcagccagatccaacgttacaccacaatatatcctgccaagatctaattccggggatcggaaatccagaagcccgagaggttgccgcctttcgggctttttctttttcaaaaaaaaaaatttataaaacgatctgttgcggccggccgccgggttgtgggcaaaggcgctcgacggtgggcaaccgcttgcggttgtccacgggcggagccggtgcgcgtagcgcattgtccacaagccaagggcgaccaataattgatatatatattcataattgaaaagctaattgaacatactacttgctgtaactacttgccggagcgaggggtgtttgcaagctgttgatctgaaagggctattagcgttctcacgtgcctttttgattagcgatttcacgtgaccttattagcgatttcacgtactccgattagcgatttcacgtaccctgattagcgatttcacgtggatagtttttggagcgggccggaaagccccgtgaatcaaggctttgcggggcattagcggtttcacgtggataactaccctctatccacaggcttccggggataaaaaagcccgctcgacggcgggctgttggatggggatcgcctgaatcgccccatcatccagccagaaagtgagggagccacggttgatgagagctttgttgtaggtggaccagttggtgattttgaacttttgctttgccacggaacggtctgcgttgtcgggaagatgcgtgatctgatccttcaactcagcaaaagttcgatttattcaacaaagccacgttgtgtctcaaaatctctgatgttacattgcacaagataaaaatatatcatcatgaacaataaaactgtctgcttacataaacagtaatacaaggggtgttatgagggaagcggtgatcgccgaagtatcgactcaactatcagaggtagttggcgtcatcgagcgccatctcgaaccgacgttgctggccgtacatttgtacggctccgcagtggatggcggcctgaagccacacagtgatattgatttgctggttacggtgaccgtaaggcttgatgaaacaacgcggcgagctttgatcaacgaccttttggaaacttcggcttcccctggagagagcgagattctccgcgctgtagaagtcaccattgttgtgcacgacgacatcattccgtggcgttatccagctaagcgcgaactgcaatttggagaatggcagcgcaatgacattcttgcaggtatcttcgagccagccacgatcgacattgatctggctatcttgctgacaaaagcaagagaacatagcgttgccttggtaggtccagcggcggaggaactctttgatccggttcctgaacaggatctatttgaggcgctaaatgaaaccttaacgctatggaactcgccgcccgactgggctggcgatgagcgaaatgtagtgcttacgttgtcccgcatttggtacagcgcagtaaccggcaaaatcgcgccgaaggatgtcgctgccgactgggcaatggagcgcctgccggcccagtatcagcccgtcatacttgaagctaggcaggcttatcttggacaagaagatcgcttggcctcgcgcgcagatcagttggaagaatttgttcactacgtgaaaggcgagatcaccaaggtagtcggcaaataatcactagaccaatgttacacatatatactttagattgatttaaaacttcatttttaatttaaaaggatctaggtgaagatcctttttgataatctcatgaccaaaatcccttaacgtgagttttcgttccactgagcgtcagaccccgtagaaaagatcaaaggatcttcttgagatcctttttttctgcgcgtaatctgctgcttgcaaacaaaaaaaccaccgctaccagcggtggtttgtttgccggatcaagagctaccaactcttcttccgaaggtaactggcttcagcagagcgcagataccaaatactgttcttctagtgtagccgtagttaggccaccacttcaagaactctgtagcaccgcctacatacctcgctctgctaatcctgttaccagtggctgctgccagtggcgataagtcgtgtcttaccgggttggactcaagacgatagttaccggataaggcgcagcggtcgggctgaacggggggttcgtgcacacagcccagcttggagcgaacgacctacaccgaactgagatacctacagcgtgagctatgagaaagcgccacgcttcccgaagggagaaaggcggacaggtatccggtaagcggcagggtcggaacaggagagcgcacgagggagcttccagggggaaacgcctggtatctttatagtcctgtcgggtttcgccacctctgacttgagcgtcgatttttgtgatgctcgtcaggggggcggagcctatggaaaaacgccagcaacgcggcctttttacggttcctggccttttgctggccttttgctcacatgagatctcaaacaaacacatacagcgacttagtttacccgccaatatatcctgtcaaggctcgaactaggctcggacgaagtaagcggccgcaaccttaattaaacacggcgcgccaacagcgatcgcaccaggtacc

SEQ ID NO: 278 - DNA, 8351 bp, synthetic construct
  source 1..8351: mol_type = other DNA; note = pAGS-0008 Cv PAS D promoter
acctgatcccacacacctgcccgtctgcctgacaggaagtgaacgcatgtcgagggaggcctcaccaatcgtcacacgagccctcgtcagaaacacgtctccgccacgctctccctctcactgccgaccccgcagcccttttgccctttcctaggccaccgacaggacccaggcgctctcagcatgcctcaacaacccgtactcgtgccagcggtgcccttgtgctggtgatcgcttggaagcgcatgcgaagacgaaggggcggagcaggcggcctggctgttcgaagggctcgccgccagttcgggtgcctttctccacgcgcgcctccacacctaccgatgcgtgaaggcaggcaaatgctcatgtttgcccgaactcggagtccttaaaaagccgcttcttgtcgtcgttccgagacatgttagcagatcgcagtgccacctttcctgacgcgctcggccccatattcggacgcaattgtcatttgtagcacaattggagcaaatctggcgaggcagtaggcttttaagttgcaaggcgagagagcaaagtgggacgcggcgtgattattggtatttacgcgacggcccggcgcgttagcggcccttcccccaggccagggacgattatgtatcaatattgttgcgttcgggcactcgtgcgagggctcctgcgggctggggagggggatctgggaattggaggtacgaccgagatggcttgctcggggggaggtttcctcgccgagcaagccagggttaggtgttgcgctcttgactcgttgtgcattctaggaccccactgctactcacaacaagccaaaacagtattcagtcgactggtaccaacaggctatggaggacgccaagaacatcaagaagggccccgcccccttctaccccctggaggacggcaccgccggcgagcagctgcacaaggccatgaagcgctacgccctggtgcccggcaccatcgccttcaccgacgcccacatcgaggtggacatcacctacgccgagtacttcgagatgagcgtgcgcctggccgaggccatgaagcgctacggcctgaacaccaaccaccgcatcgtggtgtgcagcgagaacagcctgcagttcttcatgcccgtgctgggcgccctgttcatcggcgtggccgtggcccccgccaacgacatctacaacgagcgcgagctgctgaacagcatgggcatcagccagcccaccgtggtgttcgtgagcaagaagggcctgcagaagatcctgaacgtgcagaagaagctgcccatcatccagaagatcatcatcatggacagcaagaccgactaccagggcttccagagcatgtacaccttcgtgaccagccacctgccccccggcttcaacgagtacgacttcgtgcccgagagcttcgaccgcgacaagaccatcgccctgatcatgaacagcagcggcagcaccggcctgcccaagggcgtggccctgccccaccgcaccgcctgcgtgcgcttcagccacgcccgcgaccccatcttcggcaaccagatcatccccgacaccgccatcctgagcgtggtgcccttccaccacggcttcggcatgttcaccaccctgggctacctgatctgcggcttccgcgtggtgctgatgtaccgcttcgaggaggagctgttcctgcgcagcctgcaggactacaagatccagagcgccctgctggtgcccaccctgttcagcttcttcgccaagagcaccctgatcgacaagtacgacctgagcaacctgcacgagatcgccagcggcggcgcccccctgagcaaggaggtgggcgaggccgtggccaagcgcttccacctgcccggcatccgccagggctacggcctgaccgagaccaccagcgccatcctgatcacccccgagggcgacgacaagcccggcgccgtgggcaaggtggtgcccttcttcgaggccaaggtggtggacctggacaccggcaagaccctgggcgtgaaccagcgcggcgagctgtgcgtgcgcggccccatgatcatgagcggctacgtgaacaaccccgaggccaccaacgccctgatcgacaaggacggctggctgcacagcggcgacatcgcctactgggacgaggacgagcacttcttcatcgtggaccgcctgaagagcctgatcaagtacaagggctaccaggtggcccccgccgagctggagagcatcctgctgcagcaccccaacatcttcgacgccggcgtggccggcctgcccgacgacgacgccggcgagctgcccgccgccgtggtggtgctggagcacggcaagaccatgaccgagaaggagatcgtggactacgtggccagccaggtgaccaccgccaagaagctgcgcggcggcgtggtgttcgtggacgaggtgcccaagggcctgaccggcaagctggacgcccgcaagatccgcgagatcctgatcaaggccaagaagggcggcaagatcgccgtgtcaggtggatcctagataacctttaccttcattccctgtaaattggtaccctgcaaagctttcgttcgtatcatcggtttcgacaacgttcgtcaagttcaatgcatcagtttcattgcgcacacaccagaatcctactgagtttgagtattatggcattgggaaaactgtttttcttgtaccatttgttgtgcttgtaatttactgtgttttttattcggttttcgctatcgaactgtgaaatggaaatggatggagaagagttaatgaatgatatggtccttttgttcattctcaaattaatattatttgttttttctcttatttgttgtgtgttgaatttgaaattataagagatatgcaaacattttgttttgagtaaaaatgtgtcaaatcgtggcctctaatgaccgaagttaatatgaggagtaaaacacttgtagttgtaccattatgcttattcactaggcaacaaatatattttcagacctagaaaagctgcaaatgttactgaatacaagtatgtcctcttgtgttttagacatttatgaactttcctttatgtaattttccagaatccttgtcagattctaatcattgctttataattatagttatactcatggatttgtagttgagtatgaaaatattttttaatgcattttatgacttgccaattgattgacaacatgcatcaatcgactagtcgacgagtcagtaataaacggcgtcaaagtggttgcagccggcacacacgagtcgtgtttatcaactcaaagcacaaatacttttcctcaacctaaaaataaggcaattagccaaaaacaactttgcgtgtaaacaacgctcaatacacgtgtcattttattattagctattgcttcaccgccttagctttctcgtgacctagtcgtcctcgtcttttcttcttcttcttctataaaacaatacccaaagagctcttcttcttcacaattcagatttcaatttctcaaaatcttaaaaactttctctcaattctctctaccgtgatcaaggtaaatttctgtgttccttattctctcaaaatcttcgattttgttttcgttcgatcccaatttcgtatatgttctttggtttagattctgttaatcttagatcgaagacgattttctgggtttgatcgttagatatcatcttaattctcgattagggtttcatagatatcatccgatttgttcaaataatttgagttttgtcgaataattactcttcgatttgtgatttctatctagatctggtgttagtttctagtttgtgcgatcgaatttgtagattaatctgagtttttctgattaacaccacaccaatctggtaccagaaaaggggagaagcaaaaccatgggtaaaaagcctgaactcaccgcgacgtctgtcgagaagtttctgatcgaaaagttcgacagcgtctccgacctgatgcagctctcggagggcgaagaatctcgtgctttcagcttcgatgtaggagggcgtggatatgtcctgcgggtaaatagctgcgccgatggtttctacaaagatcgttatgtttatcggcactttgcatcggccgcgctcccgattccggaagtgcttgacattggggcattcagcgagagcctgacctattgcatctcccgccgtgcacagggtgtcacgttgcaagacctgcctgaaaccgaactgcccgctgttctgcaaccggtcgcggaggcgatggatgccatcgctgcggccgatcttagccagacgagcgggttcggcccattcggaccgcaaggaatcggtcaatacactacatggcgtgatttcatatgcgcgattgctgatccccatgtgtatcactggcaaactgtgatggacgacaccgtcagtgcgtccgtcgcgcaggctctcgatgagctgatgctttgggccgaggactgccccgaagtccggcacctcgtgcacgcggatttcggctccaacaatgtcctgacggacaatggccgcataacagcggtcattgactggagcgaggcgatgttcggggattcccaatacgaggtcgccaacatcttcttctggaggccgtggttggcttgtatggagcagcagacgcgctacttcgagcggaggcatccggagcttgcaggatcgccgcggctccgggcgtatatgctccgcattggtcttgaccaactctatcagagcttggttgacggcaatttcgatgatgcagcttgggcgcagggtcgatgcgacgcaatcgtccgatccggagccgggactgtcgggcgtacacaaatcgcccgcagaagcgcggccgtctggaccgatggctgtgtagaagtactcgccgatagtggaaaccgacgccccagcactcgtccgagggcaaaggaatagatgcatcctgctttaatgagatatgcgagacgcctatgatcgcatgatatttgctttcaattctgttgtgcacgttgtaaaaaacctgagcatgtgtagctcagatccttaccgccggtttcggttcattctaatgaatatatcacccgttactatcgtatttttatgaataatattctccgttcaatttactgattgtaccctactacttatatgtacaatattaaaatgaaaacaatatattgtgctgaataggtttatagcgacatctatgatagagcgccacaataacaaacaattgcgttttattattacaaatccaattttaaaaaaagcggcagaaccggtcaaacctaaaagactgattacataaatcttattcaaatttcaaaagtgccccaggggctagtatctacgacacaccgagcggcgaactaataacgctcactgaagggaactccggttccccgccggcgcgcatgggtgagattccttgaagttgagtattggccgtccgctctaccgaaagttacgggcaccattcaacccggtccagcacggcggccgggtaaccgacttgctgccccgagaattatgcagcatttttttggtgtatgtgggccccaaatgaagtgcaggtcaaaccttgacagtgacgacaaatcgttgggcgggtccagggcgaattttgcgacaacatgtcgaggctcagcaggaccggcatgcaagctagcttactagtgatattctatagtgtcacctaaatgtattctagaccaagcatgcacagctggcgttctcagccagatccaacgttacaccacaatatatcctgccaagatctaattccggggatcggaaatccagaagcccgagaggttgccgcctttcgggctttttctttttcaaaaaaaaaaatttataaaacgatctgttgcggccggccgccgggttgtgggcaaaggcgctcgacggtgggcaaccgcttgcggttgtccacgggcggagccggtgcgcgtagcgcattgtccacaagccaagggcgaccaataattgatatatatattcataattgaaaagctaattgaacatactacttgctgtaactacttgccggagcgaggggtgtttgcaagctgttgatctgaaagggctattagcgttctcacgtgcctttttgattagcgatttcacgtgaccttattagcgatttcacgtactccgattagcgatttcacgtaccctgattagcgatttcacgtggatagtttttggagcgggccggaaagccccgtgaatcaaggctttgcggggcattagcggtttcacgtggataactaccctctatccacaggcttccggggataaaaaagcccgctcgacggcgggctgttggatggggatcgcctgaatcgccccatcatccagccagaaagtgagggagccacggttgatgagagctttgttgtaggtggaccagttggtgattttgaacttttgctttgccacggaacggtctgcgttgtcgggaagatgcgtgatctgatccttcaactcagcaaaagttcgatttattcaacaaagccacgttgtgtctcaaaatctctgatgttacattgcacaagataaaaatatatcatcatgaacaataaaactgtctgcttacataaacagtaatacaaggggtgttatgagggaagcggtgatcgccgaagtatcgactcaactatcagaggtagttggcgtcatcgagcgccatctcgaaccgacgttgctggccgtacatttgtacggctccgcagtggatggcggcctgaagccacacagtgatattgatttgctggttacggtgaccgtaaggcttgatgaaacaacgcggcgagctttgatcaacgaccttttggaaacttcggcttcccctggagagagcgagattctccgcgctgtagaagtcaccattgttgtgcacgacgacatcattccgtggcgttatccagctaagcgcgaactgcaatttggagaatggcagcgcaatgacattcttgcaggtatcttcgagccagccacgatcgacattgatctggctatcttgctgacaaaagcaagagaacatagcgttgccttggtaggtccagcggcggaggaactctttgatccggttcctgaacaggatctatttgaggcgctaaatgaaaccttaacgctatggaactcgccgcccgactgggctggcgatgagcgaaatgtagtgcttacgttgtcccgcatttggtacagcgcagtaaccggcaaaatcgcgccgaaggatgtcgctgccgactgggcaatggagcgcctgccggcccagtatcagcccgtcatacttgaagctaggcaggcttatcttggacaagaagatcgcttggcctcgcgcgcagatcagttggaagaatttgttcactacgtgaaaggcgagatcaccaaggtagtcggcaaataatcactagaccaatgttacacatatatactttagattgatttaaaacttcatttttaatttaaaaggatctaggtgaagatcctttttgataatctcatgaccaaaatcccttaacgtgagttttcgttccactgagcgtcagaccccgtagaaaagatcaaaggatcttcttgagatcctttttttctgcgcgtaatctgctgcttgcaaacaaaaaaaccaccgctaccagcggtggtttgtttgccggatcaagagctaccaactcttcttccgaaggtaactggcttcagcagagcgcagataccaaatactgttcttctagtgtagccgtagttaggccaccacttcaagaactctgtagcaccgcctacatacctcgctctgctaatcctgttaccagtggctgctgccagtggcgataagtcgtgtcttaccgggttggactcaagacgatagttaccggataaggcgcagcggtcgggctgaacggggggttcgtgcacacagcccagcttggagcgaacgacctacaccgaactgagatacctacagcgtgagctatgagaaagcgccacgcttcccgaagggagaaaggcggacaggtatccggtaagcggcagggtcggaacaggagagcgcacgagggagcttccagggggaaacgcctggtatctttatagtcctgtcgggtttcgccacctctgacttgagcgtcgatttttgtgatgctcgtcaggggggcggagcctatggaaaaacgccagcaacgcggcctttttacggttcctggccttttgctggccttttgctcacatgagatctcaaacaaacacatacagcgacttagtttacccgccaatatatcctgtcaaggctcgaactaggctcggacgaagtaagcggccgcaaccttaattaaacacggcgcgccaacagcgatcgcaccaggtacc

SEQ ID NO: 279 - DNA, 7734 bp, synthetic construct
  source 1..7734: mol_type = other DNA; note = pAGS-0009 CMV promoter
acctgtgatgcggttttggcagtacatcaatgggcgtggatagcggtttgactcacggggatttccaagtctccaccccattgacgtcaatgggagtttgttttggcaccaaaatcaacgggactttccaaaatgtcgtaacaactccgccccattgacgcaaatgggcggtaggcgtgtacggtgggaggtctatataagcagagctaacagtattcagtcgactggtaccaacaggctatggaggacgccaagaacatcaagaagggccccgcccccttctaccccctggaggacggcaccgccggcgagcagctgcacaaggccatgaagcgctacgccctggtgcccggcaccatcgccttcaccgacgcccacatcgaggtggacatcacctacgccgagtacttcgagatgagcgtgcgcctggccgaggccatgaagcgctacggcctgaacaccaaccaccgcatcgtggtgtgcagcgagaacagcctgcagttcttcatgcccgtgctgggcgccctgttcatcggcgtggccgtggcccccgccaacgacatctacaacgagcgcgagctgctgaacagcatgggcatcagccagcccaccgtggtgttcgtgagcaagaagggcctgcagaagatcctgaacgtgcagaagaagctgcccatcatccagaagatcatcatcatggacagcaagaccgactaccagggcttccagagcatgtacaccttcgtgaccagccacctgccccccggcttcaacgagtacgacttcgtgcccgagagcttcgaccgcgacaagaccatcgccctgatcatgaacagcagcggcagcaccggcctgcccaagggcgtggccctgccccaccgcaccgcctgcgtgcgcttcagccacgcccgcgaccccatcttcggcaaccagatcatccccgacaccgccatcctgagcgtggtgcccttccaccacggcttcggcatgttcaccaccctgggctacctgatctgcggcttccgcgtggtgctgatgtaccgcttcgaggaggagctgttcctgcgcagcctgcaggactacaagatccagagcgccctgctggtgcccaccctgttcagcttcttcgccaagagcaccctgatcgacaagtacgacctgagcaacctgcacgagatcgccagcggcggcgcccccctgagcaaggaggtgggcgaggccgtggccaagcgcttccacctgcccggcatccgccagggctacggcctgaccgagaccaccagcgccatcctgatcacccccgagggcgacgacaagcccggcgccgtgggcaaggtggtgcccttcttcgaggccaaggtggtggacctggacaccggcaagaccctgggcgtgaaccagcgcggcgagctgtgcgtgcgcggccccatgatcatgagcggctacgtgaacaaccccgaggccaccaacgccctgatcgacaaggacggctggctgcacagcggcgacatcgcctactgggacgaggacgagcacttcttcatcgtggaccgcctgaagagcctgatcaagtacaagggctaccaggtggcccccgccgagctggagagcatcctgctgcagcaccccaacatcttcgacgccggcgtggccggcctgcccgacgacgacgccggcgagctgcccgccgccgtggtggtgctggagcacggcaagaccatgaccgagaaggagatcgtggactacgtggccagccaggtgaccaccgccaagaagctgcgcggcggcgtggtgttcgtggacgaggtgcccaagggcctgaccggcaagctggacgcccgcaagatccgcgagatcctgatcaaggccaagaagggcggcaagatcgccgtgtcaggtggatcctagataacctttaccttcattccctgtaaattggtaccctgcaaagctttcgttcgtatcatcggtttcgacaacgttcgtcaagttcaatgcatcagtttcattgcgcacacaccagaatcctactgagtttgagtattatggcattgggaaaactgtttttcttgtaccatttgttgtgcttgtaatttactgtgttttttattcggttttcgctatcgaactgtgaaatggaaatggatggagaagagttaatgaatgatatggtccttttgttcattctcaaattaatattatttgttttttctcttatttgttgtgtgttgaatttgaaattataagagatatgcaaacattttgttttgagtaaaaatgtgtcaaatcgtggcctctaatgaccgaagttaatatgaggagtaaaacacttgtagttgtaccattatgcttattcactaggcaacaaatatattttcagacctagaaaagctgcaaatgttactgaatacaagtatgtcctcttgtgttttagacatttatgaactttcctttatgtaattttccagaatccttgtcagattctaatcattgctttataattatagttatactcatggatttgtagttgagtatgaaaatattttttaatgcattttatgacttgccaattgattgacaacatgcatcaatcgactagtcgacgagtcagtaataaacggcgtcaaagtggttgcagccggcacacacgagtcgtgtttatcaactcaaagcacaaatacttttcctcaacctaaaaataaggcaattagccaaaaacaactttgcgtgtaaacaacgctcaatacacgtgtcattttattattagctattgcttcaccgccttagctttctcgtgacctagtcgtcctcgtcttttcttcttcttcttctataaaacaatacccaaagagctcttcttcttcacaattcagatttcaatttctcaaaatcttaaaaactttctctcaattctctctaccgtgatcaaggtaaatttctgtgttccttattctctcaaaatcttcgattttgttttcgttcgatcccaatttcgtatatgttctttggtttagattctgttaatcttagatcgaagacgattttctgggtttgatcgttagatatcatcttaattctcgattagggtttcatagatatcatccgatttgttcaaataatttgagttttgtcgaataattactcttcgatttgtgatttctatctagatctggtgttagtttctagtttgtgcgatcgaatttgtagattaatctgagtttttctgattaacaccacaccaatctggtaccagaaaaggggagaagcaaaaccatgggtaaaaagcctgaactcaccgcgacgtctgtcgagaagtttctgatcgaaaagttcgacagcgtctccgacctgatgcagctctcggagggcgaagaatctcgtgctttcagcttcgatgtaggagggcgtggatatgtcctgcgggtaaatagctgcgccgatggtttctacaaagatcgttatgtttatcggcactttgcatcggccgcgctcccgattccggaagtgcttgacattggggcattcagcgagagcctgacctattgcatctcccgccgtgcacagggtgtcacgttgcaagacctgcctgaaaccgaactgcccgctgttctgcaaccggtcgcggaggcgatggatgccatcgctgcggccgatcttagccagacgagcgggttcggcccattcggaccgcaaggaatcggtcaatacactacatggcgtgatttcatatgcgcgattgctgatccccatgtgtatcactggcaaactgtgatggacgacaccgtcagtgcgtccgtcgcgcaggctctcgatgagctgatgctttgggccgaggactgccccgaagtccggcacctcgtgcacgcggatttcggctccaacaatgtcctgacggacaatggccgcataacagcggtcattgactggagcgaggcgatgttcggggattcccaatacgaggtcgccaacatcttcttctggaggccgtggttggcttgtatggagcagcagacgcgctacttcgagcggaggcatccggagcttgcaggatcgccgcggctccgggcgtatatgctccgcattggtcttgaccaactctatcagagcttggttgacggcaatttcgatgatgcagcttgggcgcagggtcgatgcgacgcaatcgtccgatccggagccgggactgtcgggcgtacacaaatcgcccgcagaagcgcggccgtctggaccgatggctgtgtagaagtactcgccgatagtggaaaccgacgccccagcactcgtccgagggcaaaggaatagatgcatcctgctttaatgagatatgcgagacgcctatgatcgcatgatatttgctttcaattctgttgtgcacgttgtaaaaaacctgagcatgtgtagctcagatccttaccgccggtttcggttcattctaatgaatatatcacccgttactatcgtatttttatgaataatattctccgttcaatttactgattgtaccctactacttatatgtacaatattaaaatgaaaacaatatattgtgctgaataggtttatagcgacatctatgatagagcgccacaataacaaacaattgcgttttattattacaaatccaattttaaaaaaagcggcagaaccggtcaaacctaaaagactgattacataaatcttattcaaatttcaaaagtgccccaggggctagtatctacgacacaccgagcggcgaactaataacgctcactgaagggaactccggttccccgccggcgcgcatgggtgagattccttgaagttgagtattggccgtccgctctaccgaaagttacgggcaccattcaacccggtccagcacggcggccgggtaaccgacttgctgccccgagaattatgcagcatttttttggtgtatgtgggccccaaatgaagtgcaggtcaaaccttgacagtgacgacaaatcgttgggcgggtccagggcgaattttgcgacaacatgtcgaggctcagcaggaccggcatgcaagctagcttactagtgatattctatagtgtcacctaaatgtattctagaccaagcatgcacagctggcgttctcagccagatccaacgttacaccacaatatatcctgccaagatctaattccggggatcggaaatccagaagcccgagaggttgccgcctttcgggctttttctttttcaaaaaaaaaaatttataaaacgatctgttgcggccggccgccgggttgtgggcaaaggcgctcgacggtgggcaaccgcttgcggttgtccacgggcggagccggtgcgcgtagcgcattgtccacaagccaagggcgaccaataattgatatatatattcataattgaaaagctaattgaacatactacttgctgtaactacttgccggagcgaggggtgtttgcaagctgttgatctgaaagggctattagcgttctcacgtgcctttttgattagcgatttcacgtgaccttattagcgatttcacgtactccgattagcgatttcacgtaccctgattagcgatttcacgtggatagtttttggagcgggccggaaagccccgtgaatcaaggctttgcggggcattagcggtttcacgtggataactaccctctatccacaggcttccggggataaaaaagcccgctcgacggcgggctgttggatggggatcgcctgaatcgccccatcatccagccagaaagtgagggagccacggttgatgagagctttgttgtaggtggaccagttggtgattttgaacttttgctttgccacggaacggtctgcgttgtcgggaagatgcgtgatctgatccttcaactcagcaaaagttcgatttattcaacaaagccacgttgtgtctcaaaatctctgatgttacattgcacaagataaaaatatatcatcatgaacaataaaactgtctgcttacataaacagtaatacaaggggtgttatgagggaagcggtgatcgccgaagtatcgactcaactatcagaggtagttggcgtcatcgagcgccatctcgaaccgacgttgctggccgtacatttgtacggctccgcagtggatggcggcctgaagccacacagtgatattgatttgctggttacggtgaccgtaaggcttgatgaaacaacgcggcgagctttgatcaacgaccttttggaaacttcggcttcccctggagagagcgagattctccgcgctgtagaagtcaccattgttgtgcacgacgacatcattccgtggcgttatccagctaagcgcgaactgcaatttggagaatggcagcgcaatgacattcttgcaggtatcttcgagccagccacgatcgacattgatctggctatcttgctgacaaaagcaagagaacatagcgttgccttggtaggtccagcggcggaggaactctttgatccggttcctgaacaggatctatttgaggcgctaaatgaaaccttaacgctatggaactcgccgcccgactgggctggcgatgagcgaaatgtagtgcttacgttgtcccgcatttggtacagcgcagtaaccggcaaaatcgcgccgaaggatgtcgctgccgactgggcaatggagcgcctgccggcccagtatcagcccgtcatacttgaagctaggcaggcttatcttggacaagaagatcgcttggcctcgcgcgcagatcagttggaagaatttgttcactacgtgaaaggcgagatcaccaaggtagtcggcaaataatcactagaccaatgttacacatatatactttagattgatttaaaacttcatttttaatttaaaaggatctaggtgaagatcctttttgataatctcatgaccaaaatcccttaacgtgagttttcgttccactgagcgtcagaccccgtagaaaagatcaaaggatcttcttgagatcctttttttctgcgcgtaatctgctgcttgcaaacaaaaaaaccaccgctaccagcggtggtttgtttgccggatcaagagctaccaactcttcttccgaaggtaactggcttcagcagagcgcagataccaaatactgttcttctagtgtagccgtagttaggccaccacttcaagaactctgtagcaccgcctacatacctcgctctgctaatcctgttaccagtggctgctgccagtggcgataagtcgtgtcttaccgggttggactcaagacgatagttaccggataaggcgcagcggtcgggctgaacggggggttcgtgcacacagcccagcttggagcgaacgacctacaccgaactgagatacctacagcgtgagctatgagaaagcgccacgcttcccgaagggagaaaggcggacaggtatccggtaagcggcagggtcggaacaggagagcgcacgagggagcttccagggggaaacgcctggtatctttatagtcctgtcgggtttcgccacctctgacttgagcgtcgatttttgtgatgctcgtcaggggggcggagcctatggaaaaacgccagcaacgcggcctttttacggttcctggccttttgctggccttttgctcacatgagatctcaaacaaacacatacagcgacttagtttacccgccaatatatcctgtcaaggctcgaactaggctcggacgaagtaagcggccgcaaccttaattaaacacggcgcgccaacagcgatcgcaccaggtacc

SEQ ID NO: 280 - DNA, 8038 bp, synthetic construct
  source 1..8038: mol_type = other DNA; note = pAGS-0010 CMV promoter + enhancer
acctcgttacataacttacggtaaatggcccgcctggctgaccgcccaacgacccccgcccattgacgtcaataatgacgtatgttcccatagtaacgccaatagggactttccattgacgtcaatgggtggagtatttacggtaaactgcccacttggcagtacatcaagtgtatcatatgccaagtacgccccctattgacgtcaatgacggtaaatggcccgcctggcattatgcccagtacatgaccttatgggactttcctacttggcagtacatctacgtattagtcatcgctattaccatggtgatgcggttttggcagtacatcaatgggcgtggatagcggtttgactcacggggatttccaagtctccaccccattgacgtcaatgggagtttgttttggcaccaaaatcaacgggactttccaaaatgtcgtaacaactccgccccattgacgcaaatgggcggtaggcgtgtacggtgggaggtctatataagcagagctaacagtattcagtcgactggtaccaacaggctatggaggacgccaagaacatcaagaagggccccgcccccttctaccccctggaggacggcaccgccggcgagcagctgcacaaggccatgaagcgctacgccctggtgcccggcaccatcgccttcaccgacgcccacatcgaggtggacatcacctacgccgagtacttcgagatgagcgtgcgcctggccgaggccatgaagcgctacggcctgaacaccaaccaccgcatcgtggtgtgcagcgagaacagcctgcagttcttcatgcccgtgctgggcgccctgttcatcggcgtggccgtggcccccgccaacgacatctacaacgagcgcgagctgctgaacagcatgggcatcagccagcccaccgtggtgttcgtgagcaagaagggcctgcagaagatcctgaacgtgcagaagaagctgcccatcatccagaagatcatcatcatggacagcaagaccgactaccagggcttccagagcatgtacaccttcgtgaccagccacctgccccccggcttcaacgagtacgacttcgtgcccgagagcttcgaccgcgacaagaccatcgccctgatcatgaacagcagcggcagcaccggcctgcccaagggcgtggccctgccccaccgcaccgcctgcgtgcgcttcagccacgcccgcgaccccatcttcggcaaccagatcatccccgacaccgccatcctgagcgtggtgcccttccaccacggcttcggcatgttcaccaccctgggctacctgatctgcggcttccgcgtggtgctgatgtaccgcttcgaggaggagctgttcctgcgcagcctgcaggactacaagatccagagcgccctgctggtgcccaccctgttcagcttcttcgccaagagcaccctgatcgacaagtacgacctgagcaacctgcacgagatcgccagcggcggcgcccccctgagcaaggaggtgggcgaggccgtggccaagcgcttccacctgcccggcatccgccagggctacggcctgaccgagaccaccagcgccatcctgatcacccccgagggcgacgacaagcccggcgccgtgggcaaggtggtgcccttcttcgaggccaaggtggtggacctggacaccggcaagaccctgggcgtgaaccagcgcggcgagctgtgcgtgcgcggccccatgatcatgagcggctacgtgaacaaccccgaggccaccaacgccctgatcgacaaggacggctggctgcacagcggcgacatcgcctactgggacgaggacgagcacttcttcatcgtggaccgcctgaagagcctgatcaagtacaagggctaccaggtggcccccgccgagctggagagcatcctgctgcagcaccccaacatcttcgacgccggcgtggccggcctgcccgacgacgacgccggcgagctgcccgccgccgtggtggtgctggagcacggcaagaccatgaccgagaaggagatcgtggactacgtggccagccaggtgaccaccgccaagaagctgcgcggcggcgtggtgttcgtggacgaggtgcccaagggcctgaccggcaagctggacgcccgcaagatccgcgagatcctgatcaaggccaagaagggcggcaagatcgccgtgtcaggtggatcctagataacctttaccttcattccctgtaaattggtaccctgcaaagctttcgttcgtatcatcggtttcgacaacgttcgtcaagttcaatgcatcagtttcattgcgcacacaccagaatcctactgagtttgagtattatggcattgggaaaactgtttttcttgtaccatttgttgtgcttgtaatttactgtgttttttattcggttttcgctatcgaactgtgaaatggaaatggatggagaagagttaatgaatgatatggtccttttgttcattctcaaattaatattatttgttttttctcttatttgttgtgtgttgaatttgaaattataagagatatgcaaacattttgttttgagtaaaaatgtgtcaaatcgtggcctctaatgaccgaagttaatatgaggagtaaaacacttgtagttgtaccattatgcttattcactaggcaacaaatatattttcagacctagaaaagctgcaaatgttactgaatacaagtatgtcctcttgtgttttagacatttatgaactttcctttatgtaattttccagaatccttgtcagattctaatcattgctttataattatagttatactcatggatttgtagttgagtatgaaaatattttttaatgcattttatgacttgccaattgattgacaacatgcatcaatcgactagtcgacgagtcagtaataaacggcgtcaaagtggttgcagccggcacacacgagtcgtgtttatcaactcaaagcacaaatacttttcctcaacctaaaaataaggcaattagccaaaaacaactttgcgtgtaaacaacgctcaatacacgtgtcattttattattagctattgcttcaccgccttagctttctcgtgacctagtcgtcctcgtcttttcttcttcttcttctataaaacaatacccaaagagctcttcttcttcacaattcagatttcaatttctcaaaatcttaaaaactttctctcaattctctctaccgtgatcaaggtaaatttctgtgttccttattctctcaaaatcttcgattttgttttcgttcgatcccaatttcgtatatgttctttggtttagattctgttaatcttagatcgaagacgattttctgggtttgatcgttagatatcatcttaattctcgattagggtttcatagatatcatccgatttgttcaaataatttgagttttgtcgaataattactcttcgatttgtgatttctatctagatctggtgttagtttctagtttgtgcgatcgaatttgtagattaatctgagtttttctgattaacaccacaccaatctggtaccagaaaaggggagaagcaaaaccatgggtaaaaagcctgaactcaccgcgacgtctgtcgagaagtttctgatcgaaaagttcgacagcgtctccgacctgatgcagctctcggagggcgaagaatctcgtgctttcagcttcgatgtaggagggcgtggatatgtcctgcgggtaaatagctgcgccgatggtttctacaaagatcgttatgtttatcggcactttgcatcggccgcgctcccgattccggaagtgcttgacattggggcattcagcgagagcctgacctattgcatctcccgccgtgcacagggtgtcacgttgcaagacctgcctgaaaccgaactgcccgctgttctgcaaccggtcgcggaggcgatggatgccatcgctgcggccgatcttagccagacgagcgggttcggcccattcggaccgcaaggaatcggtcaatacactacatggcgtgatttcatatgcgcgattgctgatccccatgtgtatcactggcaaactgtgatggacgacaccgtcagtgcgtccgtcgcgcaggctctcgatgagctgatgctttgggccgaggactgccccgaagtccggcacctcgtgcacgcggatttcggctccaacaatgtcctgacggacaatggccgcataacagcggtcattgactggagcgaggcgatgttcggggattcccaatacgaggtcgccaacatcttcttctggaggccgtggttggcttgtatggagcagcagacgcgctacttcgagcggaggcatccggagcttgcaggatcgccgcggctccgggcgtatatgctccgcattggtcttgaccaactctatcagagcttggttgacggcaatttcgatgatgcagcttgggcgcagggtcgatgcgacgcaatcgtccgatccggagccgggactgtcgggcgtacacaaatcgcccgcagaagcgcggccgtctggaccgatggctgtgtagaagtactcgccgatagtggaaaccgacgccccagcactcgtccgagggcaaaggaatagatgcatcctgctttaatgagatatgcgagacgcctatgatcgcatgatatttgctttcaattctgttgtgcacgttgtaaaaaacctgagcatgtgtagctcagatccttaccgccggtttcggttcattctaatgaatatatcacccgttactatcgtatttttatgaataatattctccgttcaatttactgattgtaccctactacttatatgtacaatattaaaatgaaaacaatatattgtgctgaataggtttatagcgacatctatgatagagcgccacaataacaaacaattgcgttttattattacaaatccaattttaaaaaaagcggcagaaccggtcaaacctaaaagactgattacataaatcttattcaaatttcaaaagtgccccaggggctagtatctacgacacaccgagcggcgaactaataacgctcactgaagggaactccggttccccgccggcgcgcatgggtgagattccttgaagttgagtattggccgtccgctctaccgaaagttacgggcaccattcaacccggtccagcacggcggccgggtaaccgacttgctgccccgagaattatgcagcatttttttggtgtatgtgggccccaaatgaagtgcaggtcaaaccttgacagtgacgacaaatcgttgggcgggtccagggcgaattttgcgacaacatgtcgaggctcagcaggaccggcatgcaagctagcttactagtgatattctatagtgtcacctaaatgtattctagaccaagcatgcacagctggcgttctcagccagatccaacgttacaccacaatatatcctgccaagatctaattccggggatcggaaatccagaagcccgagaggttgccgcctttcgggctttttctttttcaaaaaaaaaaatttataaaacgatctgttgcggccggccgccgggttgtgggcaaaggcgctcgacggtgggcaaccgcttgcggttgtccacgggcggagccggtgcgcgtagcgcattgtccacaagccaagggcgaccaataattgatatatatattcataattgaaaagctaattgaacatactacttgctgtaactacttgccggagcgaggggtgtttgcaagctgttgatctgaaagggctattagcgttctcacgtgcctttttgattagcgatttcacgtgaccttattagcgatttcacgtactccgattagcgatttcacgtaccctgattagcgatttcacgtggatagtttttggagcgggccggaaagccccgtgaatcaaggctttgcggggcattagcggtttcacgtggataactaccctctatccacaggcttccggggataaaaaagcccgctcgacggcgggctgttggatggggatcgcctgaatcgccccatcatccagccagaaagtgagggagccacggttgatgagagctttgttgtaggtggaccagttggtgattttgaacttttgctttgccacggaacggtctgcgttgtcgggaagatgcgtgatctgatccttcaactcagcaaaagttcgatttattcaacaaagccacgttgtgtctcaaaatctctgatgttacattgcacaagataaaaatatatcatcatgaacaataaaactgtctgcttacataaacagtaatacaaggggtgttatgagggaagcggtgatcgccgaagtatcgactcaactatcagaggtagttggcgtcatcgagcgccatctcgaaccgacgttgctggccgtacatttgtacggctccgcagtggatggcggcctgaagccacacagtgatattgatttgctggttacggtgaccgtaaggcttgatgaaacaacgcggcgagctttgatcaacgaccttttggaaacttcggcttcccctggagagagcgagattctccgcgctgtagaagtcaccattgttgtgcacgacgacatcattccgtggcgttatccagctaagcgcgaactgcaatttggagaatggcagcgcaatgacattcttgcaggtatcttcgagccagccacgatcgacattgatctggctatcttgctgacaaaagcaagagaacatagcgttgccttggtaggtccagcggcggaggaactctttgatccggttcctgaacaggatctatttgaggcgctaaatgaaaccttaacgctatggaactcgccgcccgactgggctggcgatgagcgaaatgtagtgcttacgttgtcccgcatttggtacagcgcagtaaccggcaaaatcgcgccgaaggatgtcgctgccgactgggcaatggagcgcctgccggcccagtatcagcccgtcatacttgaagctaggcaggcttatcttggacaagaagatcgcttggcctcgcgcgcagatcagttggaagaatttgttcactacgtgaaaggcgagatcaccaaggtagtcggcaaataatcactagaccaatgttacacatatatactttagattgatttaaaacttcatttttaatttaaaaggatctaggtgaagatcctttttgataatctcatgaccaaaatcccttaacgtgagttttcgttccactgagcgtcagaccccgtagaaaagatcaaaggatcttcttgagatcctttttttctgcgcgtaatctgctgcttgcaaacaaaaaaaccaccgctaccagcggtggtttgtttgccggatcaagagctaccaactcttcttccgaaggtaactggcttcagcagagcgcagataccaaatactgttcttctagtgtagccgtagttaggccaccacttcaagaactctgtagcaccgcctacatacctcgctctgctaatcctgttaccagtggctgctgccagtggcgataagtcgtgtcttaccgggttggactcaagacgatagttaccggataaggcgcagcggtcgggctgaacggggggttcgtgcacacagcccagcttggagcgaacgacctacaccgaactgagatacctacagcgtgagctatgagaaagcgccacgcttcccgaagggagaaaggcggacaggtatccggtaagcggcagggtcggaacaggagagcgcacgagggagcttccagggggaaacgcctggtatctttatagtcctgtcgggtttcgccacctctgacttgagcgtcgatttttgtgatgctcgtcaggggggcggagcctatggaaaaacgccagcaacgcggcctttttacggttcctggccttttgctggccttttgctcacatgagatctcaaacaaacacatacagcgacttagtttacccgccaatatatcctgtcaaggctcgaactaggctcggacgaagtaagcggccgcaaccttaattaaacacggcgcgccaacagcgatcgcaccaggtacc

SEQ ID NO: 281 - DNA, 7888 bp, synthetic construct
  source 1..7888: mol_type = other DNA; note = pAGS-0011 SV40 promoter
acctctgaggcggaaagaaccagctgtggaatgtgtgtcagttagggtgtggaaagtccccaggctccccagcaggcagaagtatgcaaagcatgcatctcaattagtcagcaaccaggtgtggaaagtccccaggctccccagcaggcagaagtatgcaaagcatgcatctcaattagtcagcaaccatagtcccgcccctaactccgcccatcccgcccctaactccgcccagttccgcccattctccgccccatggctgactaattttttttatttatgcagaggccgaggccgcctcggcctctgagctattccagaagtagtgaggaggcttttttggaggcctaggcttttgcaaaaacagtattcagtcgactggtaccaacaggctatggaggacgccaagaacatcaagaagggccccgcccccttctaccccctggaggacggcaccgccggcgagcagctgcacaaggccatgaagcgctacgccctggtgcccggcaccatcgccttcaccgacgcccacatcgaggtggacatcacctacgccgagtacttcgagatgagcgtgcgcctggccgaggccatgaagcgctacggcctgaacaccaaccaccgcatcgtggtgtgcagcgagaacagcctgcagttcttcatgcccgtgctgggcgccctgttcatcggcgtggccgtggcccccgccaacgacatctacaacgagcgcgagctgctgaacagcatgggcatcagccagcccaccgtggtgttcgtgagcaagaagggcctgcagaagatcctgaacgtgcagaagaagctgcccatcatccagaagatcatcatcatggacagcaagaccgactaccagggcttccagagcatgtacaccttcgtgaccagccacctgccccccggcttcaacgagtacgacttcgtgcccgagagcttcgaccgcgacaagaccatcgccctgatcatgaacagcagcggcagcaccggcctgcccaagggcgtggccctgccccaccgcaccgcctgcgtgcgcttcagccacgcccgcgaccccatcttcggcaaccagatcatccccgacaccgccatcctgagcgtggtgcccttccaccacggcttcggcatgttcaccaccctgggctacctgatctgcggcttccgcgtggtgctgatgtaccgcttcgaggaggagctgttcctgcgcagcctgcaggactacaagatccagagcgccctgctggtgcccaccctgttcagcttcttcgccaagagcaccctgatcgacaagtacgacctgagcaacctgcacgagatcgccagcggcggcgcccccctgagcaaggaggtgggcgaggccgtggccaagcgcttccacctgcccggcatccgccagggctacggcctgaccgagaccaccagcgccatcctgatcacccccgagggcgacgacaagcccggcgccgtgggcaaggtggtgcccttcttcgaggccaaggtggtggacctggacaccggcaagaccctgggcgtgaaccagcgcggcgagctgtgcgtgcgcggccccatgatcatgagcggctacgtgaacaaccccgaggccaccaacgccctgatcgacaaggacggctggctgcacagcggcgacatcgcctactgggacgaggacgagcacttcttcatcgtggaccgcctgaagagcctgatcaagtacaagggctaccaggtggcccccgccgagctggagagcatcctgctgcagcaccccaacatcttcgacgccggcgtggccggcctgcccgacgacgacgccggcgagctgcccgccgccgtggtggtgctggagcacggcaagaccatgaccgagaaggagatcgtggactacgtggccagccaggtgaccaccgccaagaagctgcgcggcggcgtggtgttcgtggacgaggtgcccaagggcctgaccggcaagctggacgcccgcaagatccgcgagatcctgatcaaggccaagaagggcggcaagatcgccgtgtcaggtggatcctagataacctttaccttcattccctgtaaattggtaccctgcaaagctttcgttcgtatcatcggtttcgacaacgttcgtcaagttcaatgcatcagtttcattgcgcacacaccagaatcctactgagtttgagtattatggcattgggaaaactgtttttcttgtaccatttgttgtgcttgtaatttactgtgttttttattcggttttcgctatcgaactgtgaaatggaaatggatggagaagagttaatgaatgatatggtccttttgttcattctcaaattaatattatttgttttttctcttatttgttgtgtgttgaatttgaaattataagagatatgcaaacattttgttttgagtaaaaatgtgtcaaatcgtggcctctaatgaccgaagttaatatgaggagtaaaacacttgtagttgtaccattatgcttattcactaggcaacaaatatattttcagacctagaaaagctgcaaatgttactgaatacaagtatgtcctcttgtgttttagacatttatgaactttcctttatgtaattttccagaatccttgtcagattctaatcattgctttataattatagttatactcatggatttgtagttgagtatgaaaatattttttaatgcattttatgacttgccaattgattgacaacatgcatcaatcgactagtcgacgagtcagtaataaacggcgtcaaagtggttgcagccggcacacacgagtcgtgtttatcaactcaaagcacaaatacttttcctcaacctaaaaataaggcaattagccaaaaacaactttgcgtgtaaacaacgctcaatacacgtgtcattttattattagctattgcttcaccgccttagctttctcgtgacctagtcgtcctcgtcttttcttcttcttcttctataaaacaatacccaaagagctcttcttcttcacaattcagatttcaatttctcaaaatcttaaaaactttctctcaattctctctaccgtgatcaaggtaaatttctgtgttccttattctctcaaaatcttcgattttgttttcgttcgatcccaatttcgtatatgttctttggtttagattctgttaatcttagatcgaagacgattttctgggtttgatcgttagatatcatcttaattctcgattagggtttcatagatatcatccgatttgttcaaataatttgagttttgtcgaataattactcttcgatttgtgatttctatctagatctggtgttagtttctagtttgtgcgatcgaatttgtagattaatctgagtttttctgattaacaccacaccaatctggtaccagaaaaggggagaagcaaaaccatgggtaaaaagcctgaactcaccgcgacgtctgtcgagaagtttctgatcgaaaagttcgacagcgtctccgacctgatgcagctctcggagggcgaagaatctcgtgctttcagcttcgatgtaggagggcgtggatatgtcctgcgggtaaatagctgcgccgatggtttctacaaagatcgttatgtttatcggcactttgcatcggccgcgctcccgattccggaagtgcttgacattggggcattcagcgagagcctgacctattgcatctcccgccgtgcacagggtgtcacgttgcaagacctgcctgaaaccgaactgcccgctgttctgcaaccggtcgcggaggcgatggatgccatcgctgcggccgatcttagccagacgagcgggttcggcccattcggaccgcaaggaatcggtcaatacactacatggcgtgatttcatatgcgcgattgctgatccccatgtgtatcactggcaaactgtgatggacgacaccgtcagtgcgtccgtcgcgcaggctctcgatgagctgatgctttgggccgaggactgccccgaagtccggcacctcgtgcacgcggatttcggctccaacaatgtcctgacggacaatggccgcataacagcggtcattgactggagcgaggcgatgttcggggattcccaatacgaggtcgccaacatcttcttctggaggccgtggttggcttgtatggagcagcagacgcgctacttcgagcggaggcatccggagcttgcaggatcgccgcggctccgggcgtatatgctccgcattggtcttgaccaactctatcagagcttggttgacggcaatttcgatgatgcagcttgggcgcagggtcgatgcgacgcaatcgtccgatccggagccgggactgtcgggcgtacacaaatcgcccgcagaagcgcggccgtctggaccgatggctgtgtagaagtactcgccgatagtggaaaccgacgccccagcactcgtccgagggcaaaggaatagatgcatcctgctttaatgagatatgcgagacgcctatgatcgcatgatatttgctttcaattctgttgtgcacgttgtaaaaaacctgagcatgtgtagctcagatccttaccgccggtttcggttcattctaatgaatatatcacccgttactatcgtatttttatgaataatattctccgttcaatttactgattgtaccctactacttatatgtacaatattaaaatgaaaacaatatattgtgctgaataggtttatagcgacatctatgatagagcgccacaataacaaacaattgcgttttattattacaaatccaattttaaaaaaagcggcagaaccggtcaaacctaaaagactgattacataaatcttattcaaatttcaaaagtgccccaggggctagtatctacgacacaccgagcggcgaactaataacgctcactgaagggaactccggttccccgccggcgcgcatgggtgagattccttgaagttgagtattggccgtccgctctaccgaaagttacgggcaccattcaacccggtccagcacggcggccgggtaaccgacttgctgccccgagaattatgcagcatttttttggtgtatgtgggccccaaatgaagtgcaggtcaaaccttgacagtgacgacaaatcgttgggcgggtccagggcgaattttgcgacaacatgtcgaggctcagcaggaccggcatgcaagctagcttactagtgatattctatagtgtcacctaaatgtattctagaccaagcatgcacagctggcgttctcagccagatccaacgttacaccacaatatatcctgccaagatctaattccggggatcggaaatccagaagcccgagaggttgccgcctttcgggctttttctttttcaaaaaaaaaaatttataaaacgatctgttgcggccggccgccgggttgtgggcaaaggcgctcgacggtgggcaaccgcttgcggttgtccacgggcggagccggtgcgcgtagcgcattgtccacaagccaagggcgaccaataattgatatatatattcataattgaaaagctaattgaacatactacttgctgtaactacttgccggagcgaggggtgtttgcaagctgttgatctgaaagggctattagcgttctcacgtgcctttttgattagcgatttcacgtgaccttattagcgatttcacgtactccgattagcgatttcacgtaccctgattagcgatttcacgtggatagtttttggagcgggccggaaagccccgtgaatcaaggctttgcggggcattagcggtttcacgtggataactaccctctatccacaggcttccggggataaaaaagcccgctcgacggcgggctgttggatggggatcgcctgaatcgccccatcatccagccagaaagtgagggagccacggttgatgagagctttgttgtaggtggaccagttggtgattttgaacttttgctttgccacggaacggtctgcgttgtcgggaagatgcgtgatctgatccttcaactcagcaaaagttcgatttattcaacaaagccacgttgtgtctcaaaatctctgatgttacattgcacaagataaaaatatatcatcatgaacaataaaactgtctgcttacataaacagtaatacaaggggtgttatgagggaagcggtgatcgccgaagtatcgactcaactatcagaggtagttggcgtcatcgagcgccatctcgaaccgacgttgctggccgtacatttgtacggctccgcagtggatggcggcctgaagccacacagtgatattgatttgctggttacggtgaccgtaaggcttgatgaaacaacgcggcgagctttgatcaacgaccttttggaaacttcggcttcccctggagagagcgagattctccgcgctgtagaagtcaccattgttgtgcacgacgacatcattccgtggcgttatccagctaagcgcgaactgcaatttggagaatggcagcgcaatgacattcttgcaggtatcttcgagccagccacgatcgacattgatctggctatcttgctgacaaaagcaagagaacatagcgttgccttggtaggtccagcggcggaggaactctttgatccggttcctgaacaggatctatttgaggcgctaaatgaaaccttaacgctatggaactcgccgcccgactgggctggcgatgagcgaaatgtagtgcttacgttgtcccgcatttggtacagcgcagtaaccggcaaaatcgcgccgaaggatgtcgctgccgactgggcaatggagcgcctgccggcccagtatcagcccgtcatacttgaagctaggcaggcttatcttggacaagaagatcgcttggcctcgcgcgcagatcagttggaagaatttgttcactacgtgaaaggcgagatcaccaaggtagtcggcaaataatcactagaccaatgttacacatatatactttagattgatttaaaacttcatttttaatttaaaaggatctaggtgaagatcctttttgataatctcatgaccaaaatcccttaacgtgagttttcgttccactgagcgtcagaccccgtagaaaagatcaaaggatcttcttgagatcctttttttctgcgcgtaatctgctgcttgcaaacaaaaaaaccaccgctaccagcggtggtttgtttgccggatcaagagctaccaactcttcttccgaaggtaactggcttcagcagagcgcagataccaaatactgttcttctagtgtagccgtagttaggccaccacttcaagaactctgtagcaccgcctacatacctcgctctgctaatcctgttaccagtggctgctgccagtggcgataagtcgtgtcttaccgggttggactcaagacgatagttaccggataaggcgcagcggtcgggctgaacggggggttcgtgcacacagcccagcttggagcgaacgacctacaccgaactgagatacctacagcgtgagctatgagaaagcgccacgcttcccgaagggagaaaggcggacaggtatccggtaagcggcagggtcggaacaggagagcgcacgagggagcttccagggggaaacgcctggtatctttatagtcctgtcgggtttcgccacctctgacttgagcgtcgatttttgtgatgctcgtcaggggggcggagcctatggaaaaacgccagcaacgcggcctttttacggttcctggccttttgctggccttttgctcacatgagatctcaaacaaacacatacagcgacttagtttacccgccaatatatcctgtcaaggctcgaactaggctcggacgaagtaagcggccgcaaccttaattaaacacggcgcgccaacagcgatcgcaccaggtacc

SEQ ID NO: 282 - DNA, 7994 bp, synthetic construct
  source 1..7994: mol_type = other DNA; note = pAGS-0012 SV40 promoter +enhancer
acctcgcggaacccctatttgtttatttttctaaatacattcaaatatgtatccgctcatgagacaataaccctgataaatgcttcaataatattgaaaaaggaagagtcctgaggcggaaagaaccagctgtggaatgtgtgtcagttagggtgtggaaagtccccaggctccccagcaggcagaagtatgcaaagcatgcatctcaattagtcagcaaccaggtgtggaaagtccccaggctccccagcaggcagaagtatgcaaagcatgcatctcaattagtcagcaaccatagtcccgcccctaactccgcccatcccgcccctaactccgcccagttccgcccattctccgccccatggctgactaattttttttatttatgcagaggccgaggccgcctcggcctctgagctattccagaagtagtgaggaggcttttttggaggcctaggcttttgcaaaaacagtattcagtcgactggtaccaacaggctatggaggacgccaagaacatcaagaagggccccgcccccttctaccccctggaggacggcaccgccggcgagcagctgcacaaggccatgaagcgctacgccctggtgcccggcaccatcgccttcaccgacgcccacatcgaggtggacatcacctacgccgagtacttcgagatgagcgtgcgcctggccgaggccatgaagcgctacggcctgaacaccaaccaccgcatcgtggtgtgcagcgagaacagcctgcagttcttcatgcccgtgctgggcgccctgttcatcggcgtggccgtggcccccgccaacgacatctacaacgagcgcgagctgctgaacagcatgggcatcagccagcccaccgtggtgttcgtgagcaagaagggcctgcagaagatcctgaacgtgcagaagaagctgcccatcatccagaagatcatcatcatggacagcaagaccgactaccagggcttccagagcatgtacaccttcgtgaccagccacctgccccccggcttcaacgagtacgacttcgtgcccgagagcttcgaccgcgacaagaccatcgccctgatcatgaacagcagcggcagcaccggcctgcccaagggcgtggccctgccccaccgcaccgcctgcgtgcgcttcagccacgcccgcgaccccatcttcggcaaccagatcatccccgacaccgccatcctgagcgtggtgcccttccaccacggcttcggcatgttcaccaccctgggctacctgatctgcggcttccgcgtggtgctgatgtaccgcttcgaggaggagctgttcctgcgcagcctgcaggactacaagatccagagcgccctgctggtgcccaccctgttcagcttcttcgccaagagcaccctgatcgacaagtacgacctgagcaacctgcacgagatcgccagcggcggcgcccccctgagcaaggaggtgggcgaggccgtggccaagcgcttccacctgcccggcatccgccagggctacggcctgaccgagaccaccagcgccatcctgatcacccccgagggcgacgacaagcccggcgccgtgggcaaggtggtgcccttcttcgaggccaaggtggtggacctggacaccggcaagaccctgggcgtgaaccagcgcggcgagctgtgcgtgcgcggccccatgatcatgagcggctacgtgaacaaccccgaggccaccaacgccctgatcgacaaggacggctggctgcacagcggcgacatcgcctactgggacgaggacgagcacttcttcatcgtggaccgcctgaagagcctgatcaagtacaagggctaccaggtggcccccgccgagctggagagcatcctgctgcagcaccccaacatcttcgacgccggcgtggccggcctgcccgacgacgacgccggcgagctgcccgccgccgtggtggtgctggagcacggcaagaccatgaccgagaaggagatcgtggactacgtggccagccaggtgaccaccgccaagaagctgcgcggcggcgtggtgttcgtggacgaggtgcccaagggcctgaccggcaagctggacgcccgcaagatccgcgagatcctgatcaaggccaagaagggcggcaagatcgccgtgtcaggtggatcctagataacctttaccttcattccctgtaaattggtaccctgcaaagctttcgttcgtatcatcggtttcgacaacgttcgtcaagttcaatgcatcagtttcattgcgcacacaccagaatcctactgagtttgagtattatggcattgggaaaactgtttttcttgtaccatttgttgtgcttgtaatttactgtgttttttattcggttttcgctatcgaactgtgaaatggaaatggatggagaagagttaatgaatgatatggtccttttgttcattctcaaattaatattatttgttttttctcttatttgttgtgtgttgaatttgaaattataagagatatgcaaacattttgttttgagtaaaaatgtgtcaaatcgtggcctctaatgaccgaagttaatatgaggagtaaaacacttgtagttgtaccattatgcttattcactaggcaacaaatatattttcagacctagaaaagctgcaaatgttactgaatacaagtatgtcctcttgtgttttagacatttatgaactttcctttatgtaattttccagaatccttgtcagattctaatcattgctttataattatagttatactcatggatttgtagttgagtatgaaaatattttttaatgcattttatgacttgccaattgattgacaacatgcatcaatcgactagtcgacgagtcagtaataaacggcgtcaaagtggttgcagccggcacacacgagtcgtgtttatcaactcaaagcacaaatacttttcctcaacctaaaaataaggcaattagccaaaaacaactttgcgtgtaaacaacgctcaatacacgtgtcattttattattagctattgcttcaccgccttagctttctcgtgacctagtcgtcctcgtcttttcttcttcttcttctataaaacaatacccaaagagctcttcttcttcacaattcagatttcaatttctcaaaatcttaaaaactttctctcaattctctctaccgtgatcaaggtaaatttctgtgttccttattctctcaaaatcttcgattttgttttcgttcgatcccaatttcgtatatgttctttggtttagattctgttaatcttagatcgaagacgattttctgggtttgatcgttagatatcatcttaattctcgattagggtttcatagatatcatccgatttgttcaaataatttgagttttgtcgaataattactcttcgatttgtgatttctatctagatctggtgttagtttctagtttgtgcgatcgaatttgtagattaatctgagtttttctgattaacaccacaccaatctggtaccagaaaaggggagaagcaaaaccatgggtaaaaagcctgaactcaccgcgacgtctgtcgagaagtttctgatcgaaaagttcgacagcgtctccgacctgatgcagctctcggagggcgaagaatctcgtgctttcagcttcgatgtaggagggcgtggatatgtcctgcgggtaaatagctgcgccgatggtttctacaaagatcgttatgtttatcggcactttgcatcggccgcgctcccgattccggaagtgcttgacattggggcattcagcgagagcctgacctattgcatctcccgccgtgcacagggtgtcacgttgcaagacctgcctgaaaccgaactgcccgctgttctgcaaccggtcgcggaggcgatggatgccatcgctgcggccgatcttagccagacgagcgggttcggcccattcggaccgcaaggaatcggtcaatacactacatggcgtgatttcatatgcgcgattgctgatccccatgtgtatcactggcaaactgtgatggacgacaccgtcagtgcgtccgtcgcgcaggctctcgatgagctgatgctttgggccgaggactgccccgaagtccggcacctcgtgcacgcggatttcggctccaacaatgtcctgacggacaatggccgcataacagcggtcattgactggagcgaggcgatgttcggggattcccaatacgaggtcgccaacatcttcttctggaggccgtggttggcttgtatggagcagcagacgcgctacttcgagcggaggcatccggagcttgcaggatcgccgcggctccgggcgtatatgctccgcattggtcttgaccaactctatcagagcttggttgacggcaatttcgatgatgcagcttgggcgcagggtcgatgcgacgcaatcgtccgatccggagccgggactgtcgggcgtacacaaatcgcccgcagaagcgcggccgtctggaccgatggctgtgtagaagtactcgccgatagtggaaaccgacgccccagcactcgtccgagggcaaaggaatagatgcatcctgctttaatgagatatgcgagacgcctatgatcgcatgatatttgctttcaattctgttgtgcacgttgtaaaaaacctgagcatgtgtagctcagatccttaccgccggtttcggttcattctaatgaatatatcacccgttactatcgtatttttatgaataatattctccgttcaatttactgattgtaccctactacttatatgtacaatattaaaatgaaaacaatatattgtgctgaataggtttatagcgacatctatgatagagcgccacaataacaaacaattgcgttttattattacaaatccaattttaaaaaaagcggcagaaccggtcaaacctaaaagactgattacataaatcttattcaaatttcaaaagtgccccaggggctagtatctacgacacaccgagcggcgaactaataacgctcactgaagggaactccggttccccgccggcgcgcatgggtgagattccttgaagttgagtattggccgtccgctctaccgaaagttacgggcaccattcaacccggtccagcacggcggccgggtaaccgacttgctgccccgagaattatgcagcatttttttggtgtatgtgggccccaaatgaagtgcaggtcaaaccttgacagtgacgacaaatcgttgggcgggtccagggcgaattttgcgacaacatgtcgaggctcagcaggaccggcatgcaagctagcttactagtgatattctatagtgtcacctaaatgtattctagaccaagcatgcacagctggcgttctcagccagatccaacgttacaccacaatatatcctgccaagatctaattccggggatcggaaatccagaagcccgagaggttgccgcctttcgggctttttctttttcaaaaaaaaaaatttataaaacgatctgttgcggccggccgccgggttgtgggcaaaggcgctcgacggtgggcaaccgcttgcggttgtccacgggcggagccggtgcgcgtagcgcattgtccacaagccaagggcgaccaataattgatatatatattcataattgaaaagctaattgaacatactacttgctgtaactacttgccggagcgaggggtgtttgcaagctgttgatctgaaagggctattagcgttctcacgtgcctttttgattagcgatttcacgtgaccttattagcgatttcacgtactccgattagcgatttcacgtaccctgattagcgatttcacgtggatagtttttggagcgggccggaaagccccgtgaatcaaggctttgcggggcattagcggtttcacgtggataactaccctctatccacaggcttccggggataaaaaagcccgctcgacggcgggctgttggatggggatcgcctgaatcgccccatcatccagccagaaagtgagggagccacggttgatgagagctttgttgtaggtggaccagttggtgattttgaacttttgctttgccacggaacggtctgcgttgtcgggaagatgcgtgatctgatccttcaactcagcaaaagttcgatttattcaacaaagccacgttgtgtctcaaaatctctgatgttacattgcacaagataaaaatatatcatcatgaacaataaaactgtctgcttacataaacagtaatacaaggggtgttatgagggaagcggtgatcgccgaagtatcgactcaactatcagaggtagttggcgtcatcgagcgccatctcgaaccgacgttgctggccgtacatttgtacggctccgcagtggatggcggcctgaagccacacagtgatattgatttgctggttacggtgaccgtaaggcttgatgaaacaacgcggcgagctttgatcaacgaccttttggaaacttcggcttcccctggagagagcgagattctccgcgctgtagaagtcaccattgttgtgcacgacgacatcattccgtggcgttatccagctaagcgcgaactgcaatttggagaatggcagcgcaatgacattcttgcaggtatcttcgagccagccacgatcgacattgatctggctatcttgctgacaaaagcaagagaacatagcgttgccttggtaggtccagcggcggaggaactctttgatccggttcctgaacaggatctatttgaggcgctaaatgaaaccttaacgctatggaactcgccgcccgactgggctggcgatgagcgaaatgtagtgcttacgttgtcccgcatttggtacagcgcagtaaccggcaaaatcgcgccgaaggatgtcgctgccgactgggcaatggagcgcctgccggcccagtatcagcccgtcatacttgaagctaggcaggcttatcttggacaagaagatcgcttggcctcgcgcgcagatcagttggaagaatttgttcactacgtgaaaggcgagatcaccaaggtagtcggcaaataatcactagaccaatgttacacatatatactttagattgatttaaaacttcatttttaatttaaaaggatctaggtgaagatcctttttgataatctcatgaccaaaatcccttaacgtgagttttcgttccactgagcgtcagaccccgtagaaaagatcaaaggatcttcttgagatcctttttttctgcgcgtaatctgctgcttgcaaacaaaaaaaccaccgctaccagcggtggtttgtttgccggatcaagagctaccaactcttcttccgaaggtaactggcttcagcagagcgcagataccaaatactgttcttctagtgtagccgtagttaggccaccacttcaagaactctgtagcaccgcctacatacctcgctctgctaatcctgttaccagtggctgctgccagtggcgataagtcgtgtcttaccgggttggactcaagacgatagttaccggataaggcgcagcggtcgggctgaacggggggttcgtgcacacagcccagcttggagcgaacgacctacaccgaactgagatacctacagcgtgagctatgagaaagcgccacgcttcccgaagggagaaaggcggacaggtatccggtaagcggcagggtcggaacaggagagcgcacgagggagcttccagggggaaacgcctggtatctttatagtcctgtcgggtttcgccacctctgacttgagcgtcgatttttgtgatgctcgtcaggggggcggagcctatggaaaaacgccagcaacgcggcctttttacggttcctggccttttgctggccttttgctcacatgagatctcaaacaaacacatacagcgacttagtttacccgccaatatatcctgtcaaggctcgaactaggctcggacgaagtaagcggccgcaaccttaattaaacacggcgcgccaacagcgatcgcaccaggtacc

SEQ ID NO: 283 - DNA, 4252 bp, synthetic construct
  source 1..4252: mol_type = other DNA; note = pAGS-0013 EF2 promoter
accttccattttgacatgtttcctagctagaaggaacagctattcatatgaattttccgaggtcacgctgtgatggatcgattcgttcccgtcacagacgcaagcagcgaggtgatggctggacgggcacgcgtcacaatttagaacaacccggactcttgtgacgcgagctccgggtgcggaaaaccctacggggtgaaaggagccgcagcttccacccatttacttgactgataacccagtacacacaacgctaccgtgacggaaatgccgcgcgctgtgaagccgtggtgaatctttcgctgctgctcgttctctccacacacacaacagtattcagtcgactggtaccaacaggctatggtgagcaagggcgaggagctgttcaccggcgtggtgcccatcctggtggagctggacggcgacgtgaacggccacaagttcagcgtgagcggcgagggcgagggcgacgccacctacggcaagctgaccctgaagttcatctgcaccaccggcaagctgcccgtgccctggcccaccctggtgaccaccctgacctacggcgtgcagtgcttcagccgctaccccgaccacatgaagcagcacgacttcttcaagagcgccatgcccgagggctacgtgcaggagcgcaccatcttcttcaaggacgacggcaactacaagacccgcgccgaggtgaagttcgagggcgacaccctggtgaaccgcatcgagctgaagggcatcgacttcaaggaggacggcaacatcctgggccacaagctggagtacaactacaacagccacaacgtgtacatcatggccgacaagcagaagaacggcatcaaggtgaacttcaagatccgccacaacatcgaggacggcagcgtgcagctggccgaccactaccagcagaacacccccatcggcgacggccccgtgctgctgcccgacaaccactacctgagcacccagagcgccctgagcaaggaccccaacgagaagcgcgaccacatggtgctgctggagttcgtgaccgccgccggcatcaccctgggcatggacgagctgtacaagtcaggtggatcctagataacctttaccttcattccctgtaaattggtaccctgcaaagctttcgttcgtatcatcggtttcgacaacgttcgtcaagttcaatgcatcagtttcattgcgcacacaccagaatcctactgagtttgagtattatggcattgggaaaactgtttttcttgtaccatttgttgtgcttgtaatttactgtgttttttattcggttttcgctatcgaactgtgaaatggaaatggatggagaagagttaatgaatgatatggtccttttgttcattctcaaattaatattatttgttttttctcttatttgttgtgtgttgaatttgaaattataagagatatgcaaacattttgttttgagtaaaaatgtgtcaaatcgtggcctctaatgaccgaagttaatatgaggagtaaaacacttgtagttgtaccattatgcttattcactaggcaacaaatatattttcagacctagaaaagctgcaaatgttactgaatacaagtatgtcctcttgtgttttagacatttatgaactttcctttatgtaattttccagaatccttgtcagattctaatcattgctttataattatagttatactcatggatttgtagttgagtatgaaaatattttttaatgcattttatgacttgccaattgattgacaacatgcatcaatcgactagtcgacgagtcagtaataaacggcgtcaaagtggttgcagccggcacacacgagtcgtgtttatcaactcaaagcacaaatacttttcctcaacctaaaaataaggcaattagccaaaaacaactttgcgtgtaaacaacgctcaatacacgtgtcattttattattagctattgcttcaccgccttagctttctcgtgacctagtcgtcctcgtcttttcttcttcttcttctataaaacaatacccaaagagctcttcttcttcacaattcagatttcaatttctcaaaatcttaaaaactttctctcaattctctctaccgtgatcaaggtaaatttctgtgttccttattctctcaaaatcttcgattttgttttcgttcgatcccaatttcgtatatgttctttggtttagattctgttaatcttagatcgaagacgattttctgggtttgatcgttagatatcatcttaattctcgattagggtttcatagatatcatccgatttgttcaaataatttgagttttgtcgaataattactcttcgatttgtgatttctatctagatctggtgttagtttctagtttgtgcgatcgaatttgtagattaatctgagtttttctgattaacaccacaccaatctggtaccagaaaaggggagaagcaaaaccatgggtaaaaagcctgaactcaccgcgacgtctgtcgagaagtttctgatcgaaaagttcgacagcgtctccgacctgatgcagctctcggagggcgaagaatctcgtgctttcagcttcgatgtaggagggcgtggatatgtcctgcgggtaaatagctgcgccgatggtttctacaaagatcgttatgtttatcggcactttgcatcggccgcgctcccgattccggaagtgcttgacattggggcattcagcgagagcctgacctattgcatctcccgccgtgcacagggtgtcacgttgcaagacctgcctgaaaccgaactgcccgctgttctgcaaccggtcgcggaggcgatggatgccatcgctgcggccgatcttagccagacgagcgggttcggcccattcggaccgcaaggaatcggtcaatacactacatggcgtgatttcatatgcgcgattgctgatccccatgtgtatcactggcaaactgtgatggacgacaccgtcagtgcgtccgtcgcgcaggctctcgatgagctgatgctttgggccgaggactgccccgaagtccggcacctcgtgcacgcggatttcggctccaacaatgtcctgacggacaatggccgcataacagcggtcattgactggagcgaggcgatgttcggggattcccaatacgaggtcgccaacatcttcttctggaggccgtggttggcttgtatggagcagcagacgcgctacttcgagcggaggcatccggagcttgcaggatcgccgcggctccgggcgtatatgctccgcattggtcttgaccaactctatcagagcttggttgacggcaatttcgatgatgcagcttgggcgcagggtcgatgcgacgcaatcgtccgatccggagccgggactgtcgggcgtacacaaatcgcccgcagaagcgcggccgtctggaccgatggctgtgtagaagtactcgccgatagtggaaaccgacgccccagcactcgtccgagggcaaaggaatagatgcatcctgctttaatgagatatgcgagacgcctatgatcgcatgatatttgctttcaattctgttgtgcacgttgtaaaaaacctgagcatgtgtagctcagatccttaccgccggtttcggttcattctaatgaatatatcacccgttactatcgtatttttatgaataatattctccgttcaatttactgattgtaccctactacttatatgtacaatattaaaatgaaaacaatatattgtgctgaataggtttatagcgacatctatgatagagcgccacaataacaaacaattgcgttttattattacaaatccaattttaaaaaaagcggcagaaccggtcaaacctaaaagactgattacataaatcttattcaaatttcaaaagtgccccaggggctagtatctacgacacaccgagcggcgaactaataacgctcactgaagggaactccggttccccgccggcgcgcatgggtgagattccttgaagttgagtattggccgtccgctctaccgaaagttacgggcaccattcaacccggtccagcacggcggccgggtaaccgacttgctgccccgagaattatgcagcatttttttggtgtatgtgggccccaaatgaagtgcaggtcaaaccttgacagtgacgacaaatcgttgggcgggtccagggcgaattttgcgacaacatgtcgaggctcagcaggaccggcatgcaagctagcttactagtgatattctatagtgtcacctaaat

SEQ ID NO: 284 - DNA, 4578 bp, synthetic construct
  source 1..4578: mol_type = other DNA; note = pAGS-0014 Histone 4 promoter
acctgcaatctcacgcaccaggcgctggaagggcaacttgcggatgagaaggtccgtggacttctggtaacgacggatctcacgcagagcgacggttccagggcgataacggtggggcttcttgactcctccggtagccggagcggacttacgggcagccttggtggcaagctgcttgcgcggcgctttgcctccggtggatttacgggcggtttgcttggttcgggccattttgacggttttttttacaagagaagagttcttgaaatttgtgaggttaaagtgtgtggcttccgccgtagtcaaggagcgtgcggttgccgatcgcaccggtacgttctgtagaaatgaacacagtgtgttgaattgaaagtatggcgcaggtatggtgtgtgataagtagcagccgcgccgagacaaacaaactttggtttctacgacaatctctgtagacaagtactagaaacccgtttgaacgagcataaatctgcaccggcaggccaccagacatcgtttcaacgtaatattctacgtaaccattttatcccaggaaacctacggcctgtgaaccactgaaaggaagcactcacaattcgctctcggcaacaaccgacaatagtcttactcacagtcaataccgaaaacaaacaacagaacagtattcagtcgactggtaccaacaggctatggtgagcaagggcgaggagctgttcaccggcgtggtgcccatcctggtggagctggacggcgacgtgaacggccacaagttcagcgtgagcggcgagggcgagggcgacgccacctacggcaagctgaccctgaagttcatctgcaccaccggcaagctgcccgtgccctggcccaccctggtgaccaccctgacctacggcgtgcagtgcttcagccgctaccccgaccacatgaagcagcacgacttcttcaagagcgccatgcccgagggctacgtgcaggagcgcaccatcttcttcaaggacgacggcaactacaagacccgcgccgaggtgaagttcgagggcgacaccctggtgaaccgcatcgagctgaagggcatcgacttcaaggaggacggcaacatcctgggccacaagctggagtacaactacaacagccacaacgtgtacatcatggccgacaagcagaagaacggcatcaaggtgaacttcaagatccgccacaacatcgaggacggcagcgtgcagctggccgaccactaccagcagaacacccccatcggcgacggccccgtgctgctgcccgacaaccactacctgagcacccagagcgccctgagcaaggaccccaacgagaagcgcgaccacatggtgctgctggagttcgtgaccgccgccggcatcaccctgggcatggacgagctgtacaagtcaggtggatcctagataacctttaccttcattccctgtaaattggtaccctgcaaagctttcgttcgtatcatcggtttcgacaacgttcgtcaagttcaatgcatcagtttcattgcgcacacaccagaatcctactgagtttgagtattatggcattgggaaaactgtttttcttgtaccatttgttgtgcttgtaatttactgtgttttttattcggttttcgctatcgaactgtgaaatggaaatggatggagaagagttaatgaatgatatggtccttttgttcattctcaaattaatattatttgttttttctcttatttgttgtgtgttgaatttgaaattataagagatatgcaaacattttgttttgagtaaaaatgtgtcaaatcgtggcctctaatgaccgaagttaatatgaggagtaaaacacttgtagttgtaccattatgcttattcactaggcaacaaatatattttcagacctagaaaagctgcaaatgttactgaatacaagtatgtcctcttgtgttttagacatttatgaactttcctttatgtaattttccagaatccttgtcagattctaatcattgctttataattatagttatactcatggatttgtagttgagtatgaaaatattttttaatgcattttatgacttgccaattgattgacaacatgcatcaatcgactagtcgacgagtcagtaataaacggcgtcaaagtggttgcagccggcacacacgagtcgtgtttatcaactcaaagcacaaatacttttcctcaacctaaaaataaggcaattagccaaaaacaactttgcgtgtaaacaacgctcaatacacgtgtcattttattattagctattgcttcaccgccttagctttctcgtgacctagtcgtcctcgtcttttcttcttcttcttctataaaacaatacccaaagagctcttcttcttcacaattcagatttcaatttctcaaaatcttaaaaactttctctcaattctctctaccgtgatcaaggtaaatttctgtgttccttattctctcaaaatcttcgattttgttttcgttcgatcccaatttcgtatatgttctttggtttagattctgttaatcttagatcgaagacgattttctgggtttgatcgttagatatcatcttaattctcgattagggtttcatagatatcatccgatttgttcaaataatttgagttttgtcgaataattactcttcgatttgtgatttctatctagatctggtgttagtttctagtttgtgcgatcgaatttgtagattaatctgagtttttctgattaacaccacaccaatctggtaccagaaaaggggagaagcaaaaccatgggtaaaaagcctgaactcaccgcgacgtctgtcgagaagtttctgatcgaaaagttcgacagcgtctccgacctgatgcagctctcggagggcgaagaatctcgtgctttcagcttcgatgtaggagggcgtggatatgtcctgcgggtaaatagctgcgccgatggtttctacaaagatcgttatgtttatcggcactttgcatcggccgcgctcccgattccggaagtgcttgacattggggcattcagcgagagcctgacctattgcatctcccgccgtgcacagggtgtcacgttgcaagacctgcctgaaaccgaactgcccgctgttctgcaaccggtcgcggaggcgatggatgccatcgctgcggccgatcttagccagacgagcgggttcggcccattcggaccgcaaggaatcggtcaatacactacatggcgtgatttcatatgcgcgattgctgatccccatgtgtatcactggcaaactgtgatggacgacaccgtcagtgcgtccgtcgcgcaggctctcgatgagctgatgctttgggccgaggactgccccgaagtccggcacctcgtgcacgcggatttcggctccaacaatgtcctgacggacaatggccgcataacagcggtcattgactggagcgaggcgatgttcggggattcccaatacgaggtcgccaacatcttcttctggaggccgtggttggcttgtatggagcagcagacgcgctacttcgagcggaggcatccggagcttgcaggatcgccgcggctccgggcgtatatgctccgcattggtcttgaccaactctatcagagcttggttgacggcaatttcgatgatgcagcttgggcgcagggtcgatgcgacgcaatcgtccgatccggagccgggactgtcgggcgtacacaaatcgcccgcagaagcgcggccgtctggaccgatggctgtgtagaagtactcgccgatagtggaaaccgacgccccagcactcgtccgagggcaaaggaatagatgcatcctgctttaatgagatatgcgagacgcctatgatcgcatgatatttgctttcaattctgttgtgcacgttgtaaaaaacctgagcatgtgtagctcagatccttaccgccggtttcggttcattctaatgaatatatcacccgttactatcgtatttttatgaataatattctccgttcaatttactgattgtaccctactacttatatgtacaatattaaaatgaaaacaatatattgtgctgaataggtttatagcgacatctatgatagagcgccacaataacaaacaattgcgttttattattacaaatccaattttaaaaaaagcggcagaaccggtcaaacctaaaagactgattacataaatcttattcaaatttcaaaagtgccccaggggctagtatctacgacacaccgagcggcgaactaataacgctcactgaagggaactccggttccccgccggcgcgcatgggtgagattccttgaagttgagtattggccgtccgctctaccgaaagttacgggcaccattcaacccggtccagcacggcggccgggtaaccgacttgctgccccgagaattatgcagcatttttttggtgtatgtgggccccaaatgaagtgcaggtcaaaccttgacagtgacgacaaatcgttgggcgggtccagggcgaattttgcgacaacatgtcgaggctcagcaggaccggcatgcaagctagcttactagtgatattctatagtgtcacctaaat

SEQ ID NO: 285 - DNA, 4068 bp, synthetic construct
  source 1..4068: mol_type = other DNA; note = pAGS-0015 Lhcf.1 promoter
acctgctgcaggacgcaatggaggattatcaccgcaaaaatgaacttcgaaaaaaactttcgagcgaccatggaaaaggaggatcagattcagattacaacagtggattgctctggtagcaaatatcttctgctagattggctcaacagtattcagtcgactggtaccaacaggctatggtgagcaagggcgaggagctgttcaccggcgtggtgcccatcctggtggagctggacggcgacgtgaacggccacaagttcagcgtgagcggcgagggcgagggcgacgccacctacggcaagctgaccctgaagttcatctgcaccaccggcaagctgcccgtgccctggcccaccctggtgaccaccctgacctacggcgtgcagtgcttcagccgctaccccgaccacatgaagcagcacgacttcttcaagagcgccatgcccgagggctacgtgcaggagcgcaccatcttcttcaaggacgacggcaactacaagacccgcgccgaggtgaagttcgagggcgacaccctggtgaaccgcatcgagctgaagggcatcgacttcaaggaggacggcaacatcctgggccacaagctggagtacaactacaacagccacaacgtgtacatcatggccgacaagcagaagaacggcatcaaggtgaacttcaagatccgccacaacatcgaggacggcagcgtgcagctggccgaccactaccagcagaacacccccatcggcgacggccccgtgctgctgcccgacaaccactacctgagcacccagagcgccctgagcaaggaccccaacgagaagcgcgaccacatggtgctgctggagttcgtgaccgccgccggcatcaccctgggcatggacgagctgtacaagtcaggtggatcctagataacctttaccttcattccctgtaaattggtaccctgcaaagctttcgttcgtatcatcggtttcgacaacgttcgtcaagttcaatgcatcagtttcattgcgcacacaccagaatcctactgagtttgagtattatggcattgggaaaactgtttttcttgtaccatttgttgtgcttgtaatttactgtgttttttattcggttttcgctatcgaactgtgaaatggaaatggatggagaagagttaatgaatgatatggtccttttgttcattctcaaattaatattatttgttttttctcttatttgttgtgtgttgaatttgaaattataagagatatgcaaacattttgttttgagtaaaaatgtgtcaaatcgtggcctctaatgaccgaagttaatatgaggagtaaaacacttgtagttgtaccattatgcttattcactaggcaacaaatatattttcagacctagaaaagctgcaaatgttactgaatacaagtatgtcctcttgtgttttagacatttatgaactttcctttatgtaattttccagaatccttgtcagattctaatcattgctttataattatagttatactcatggatttgtagttgagtatgaaaatattttttaatgcattttatgacttgccaattgattgacaacatgcatcaatcgactagtcgacgagtcagtaataaacggcgtcaaagtggttgcagccggcacacacgagtcgtgtttatcaactcaaagcacaaatacttttcctcaacctaaaaataaggcaattagccaaaaacaactttgcgtgtaaacaacgctcaatacacgtgtcattttattattagctattgcttcaccgccttagctttctcgtgacctagtcgtcctcgtcttttcttcttcttcttctataaaacaatacccaaagagctcttcttcttcacaattcagatttcaatttctcaaaatcttaaaaactttctctcaattctctctaccgtgatcaaggtaaatttctgtgttccttattctctcaaaatcttcgattttgttttcgttcgatcccaatttcgtatatgttctttggtttagattctgttaatcttagatcgaagacgattttctgggtttgatcgttagatatcatcttaattctcgattagggtttcatagatatcatccgatttgttcaaataatttgagttttgtcgaataattactcttcgatttgtgatttctatctagatctggtgttagtttctagtttgtgcgatcgaatttgtagattaatctgagtttttctgattaacaccacaccaatctggtaccagaaaaggggagaagcaaaaccatgggtaaaaagcctgaactcaccgcgacgtctgtcgagaagtttctgatcgaaaagttcgacagcgtctccgacctgatgcagctctcggagggcgaagaatctcgtgctttcagcttcgatgtaggagggcgtggatatgtcctgcgggtaaatagctgcgccgatggtttctacaaagatcgttatgtttatcggcactttgcatcggccgcgctcccgattccggaagtgcttgacattggggcattcagcgagagcctgacctattgcatctcccgccgtgcacagggtgtcacgttgcaagacctgcctgaaaccgaactgcccgctgttctgcaaccggtcgcggaggcgatggatgccatcgctgcggccgatcttagccagacgagcgggttcggcccattcggaccgcaaggaatcggtcaatacactacatggcgtgatttcatatgcgcgattgctgatccccatgtgtatcactggcaaactgtgatggacgacaccgtcagtgcgtccgtcgcgcaggctctcgatgagctgatgctttgggccgaggactgccccgaagtccggcacctcgtgcacgcggatttcggctccaacaatgtcctgacggacaatggccgcataacagcggtcattgactggagcgaggcgatgttcggggattcccaatacgaggtcgccaacatcttcttctggaggccgtggttggcttgtatggagcagcagacgcgctacttcgagcggaggcatccggagcttgcaggatcgccgcggctccgggcgtatatgctccgcattggtcttgaccaactctatcagagcttggttgacggcaatttcgatgatgcagcttgggcgcagggtcgatgcgacgcaatcgtccgatccggagccgggactgtcgggcgtacacaaatcgcccgcagaagcgcggccgtctggaccgatggctgtgtagaagtactcgccgatagtggaaaccgacgccccagcactcgtccgagggcaaaggaatagatgcatcctgctttaatgagatatgcgagacgcctatgatcgcatgatatttgctttcaattctgttgtgcacgttgtaaaaaacctgagcatgtgtagctcagatccttaccgccggtttcggttcattctaatgaatatatcacccgttactatcgtatttttatgaataatattctccgttcaatttactgattgtaccctactacttatatgtacaatattaaaatgaaaacaatatattgtgctgaataggtttatagcgacatctatgatagagcgccacaataacaaacaattgcgttttattattacaaatccaattttaaaaaaagcggcagaaccggtcaaacctaaaagactgattacataaatcttattcaaatttcaaaagtgccccaggggctagtatctacgacacaccgagcggcgaactaataacgctcactgaagggaactccggttccccgccggcgcgcatgggtgagattccttgaagttgagtattggccgtccgctctaccgaaagttacgggcaccattcaacccggtccagcacggcggccgggtaaccgacttgctgccccgagaattatgcagcatttttttggtgtatgtgggccccaaatgaagtgcaggtcaaaccttgacagtgacgacaaatcgttgggcgggtccagggcgaattttgcgacaacatgtcgaggctcagcaggaccggcatgcaagctagcttactagtgatattctatagtgtcacctaaat

SEQ ID NO: 286 - DNA, 4191 bp, synthetic construct
  source 1..4191: mol_type = other DNA; note = pAGS-0016 Ubi.U4 promoter
acctactacgttagagcgctaacgagaatacttcatataccgtattttttacgataataataatgtaatgtgaaattgctatccaaaaggcacctaattttgtccaccgttcaaaggaaaggacaaggaagtagtagcgtgtaggtttggtgctgtacaaaataagcaagacacgtgttgccttattataggataatccataaggcaatttcgtcttaagtcggccattgcacctttaaaaggagcctctttgttcccaaaatcttcaacagtattcagtcgactggtaccaacaggctatggtgagcaagggcgaggagctgttcaccggcgtggtgcccatcctggtggagctggacggcgacgtgaacggccacaagttcagcgtgagcggcgagggcgagggcgacgccacctacggcaagctgaccctgaagttcatctgcaccaccggcaagctgcccgtgccctggcccaccctggtgaccaccctgacctacggcgtgcagtgcttcagccgctaccccgaccacatgaagcagcacgacttcttcaagagcgccatgcccgagggctacgtgcaggagcgcaccatcttcttcaaggacgacggcaactacaagacccgcgccgaggtgaagttcgagggcgacaccctggtgaaccgcatcgagctgaagggcatcgacttcaaggaggacggcaacatcctgggccacaagctggagtacaactacaacagccacaacgtgtacatcatggccgacaagcagaagaacggcatcaaggtgaacttcaagatccgccacaacatcgaggacggcagcgtgcagctggccgaccactaccagcagaacacccccatcggcgacggccccgtgctgctgcccgacaaccactacctgagcacccagagcgccctgagcaaggaccccaacgagaagcgcgaccacatggtgctgctggagttcgtgaccgccgccggcatcaccctgggcatggacgagctgtacaagtcaggtggatcctagataacctttaccttcattccctgtaaattggtaccctgcaaagctttcgttcgtatcatcggtttcgacaacgttcgtcaagttcaatgcatcagtttcattgcgcacacaccagaatcctactgagtttgagtattatggcattgggaaaactgtttttcttgtaccatttgttgtgcttgtaatttactgtgttttttattcggttttcgctatcgaactgtgaaatggaaatggatggagaagagttaatgaatgatatggtccttttgttcattctcaaattaatattatttgttttttctcttatttgttgtgtgttgaatttgaaattataagagatatgcaaacattttgttttgagtaaaaatgtgtcaaatcgtggcctctaatgaccgaagttaatatgaggagtaaaacacttgtagttgtaccattatgcttattcactaggcaacaaatatattttcagacctagaaaagctgcaaatgttactgaatacaagtatgtcctcttgtgttttagacatttatgaactttcctttatgtaattttccagaatccttgtcagattctaatcattgctttataattatagttatactcatggatttgtagttgagtatgaaaatattttttaatgcattttatgacttgccaattgattgacaacatgcatcaatcgactagtcgacgagtcagtaataaacggcgtcaaagtggttgcagccggcacacacgagtcgtgtttatcaactcaaagcacaaatacttttcctcaacctaaaaataaggcaattagccaaaaacaactttgcgtgtaaacaacgctcaatacacgtgtcattttattattagctattgcttcaccgccttagctttctcgtgacctagtcgtcctcgtcttttcttcttcttcttctataaaacaatacccaaagagctcttcttcttcacaattcagatttcaatttctcaaaatcttaaaaactttctctcaattctctctaccgtgatcaaggtaaatttctgtgttccttattctctcaaaatcttcgattttgttttcgttcgatcccaatttcgtatatgttctttggtttagattctgttaatcttagatcgaagacgattttctgggtttgatcgttagatatcatcttaattctcgattagggtttcatagatatcatccgatttgttcaaataatttgagttttgtcgaataattactcttcgatttgtgatttctatctagatctggtgttagtttctagtttgtgcgatcgaatttgtagattaatctgagtttttctgattaacaccacaccaatctggtaccagaaaaggggagaagcaaaaccatgggtaaaaagcctgaactcaccgcgacgtctgtcgagaagtttctgatcgaaaagttcgacagcgtctccgacctgatgcagctctcggagggcgaagaatctcgtgctttcagcttcgatgtaggagggcgtggatatgtcctgcgggtaaatagctgcgccgatggtttctacaaagatcgttatgtttatcggcactttgcatcggccgcgctcccgattccggaagtgcttgacattggggcattcagcgagagcctgacctattgcatctcccgccgtgcacagggtgtcacgttgcaagacctgcctgaaaccgaactgcccgctgttctgcaaccggtcgcggaggcgatggatgccatcgctgcggccgatcttagccagacgagcgggttcggcccattcggaccgcaaggaatcggtcaatacactacatggcgtgatttcatatgcgcgattgctgatccccatgtgtatcactggcaaactgtgatggacgacaccgtcagtgcgtccgtcgcgcaggctctcgatgagctgatgctttgggccgaggactgccccgaagtccggcacctcgtgcacgcggatttcggctccaacaatgtcctgacggacaatggccgcataacagcggtcattgactggagcgaggcgatgttcggggattcccaatacgaggtcgccaacatcttcttctggaggccgtggttggcttgtatggagcagcagacgcgctacttcgagcggaggcatccggagcttgcaggatcgccgcggctccgggcgtatatgctccgcattggtcttgaccaactctatcagagcttggttgacggcaatttcgatgatgcagcttgggcgcagggtcgatgcgacgcaatcgtccgatccggagccgggactgtcgggcgtacacaaatcgcccgcagaagcgcggccgtctggaccgatggctgtgtagaagtactcgccgatagtggaaaccgacgccccagcactcgtccgagggcaaaggaatagatgcatcctgctttaatgagatatgcgagacgcctatgatcgcatgatatttgctttcaattctgttgtgcacgttgtaaaaaacctgagcatgtgtagctcagatccttaccgccggtttcggttcattctaatgaatatatcacccgttactatcgtatttttatgaataatattctccgttcaatttactgattgtaccctactacttatatgtacaatattaaaatgaaaacaatatattgtgctgaataggtttatagcgacatctatgatagagcgccacaataacaaacaattgcgttttattattacaaatccaattttaaaaaaagcggcagaaccggtcaaacctaaaagactgattacataaatcttattcaaatttcaaaagtgccccaggggctagtatctacgacacaccgagcggcgaactaataacgctcactgaagggaactccggttccccgccggcgcgcatgggtgagattccttgaagttgagtattggccgtccgctctaccgaaagttacgggcaccattcaacccggtccagcacggcggccgggtaaccgacttgctgccccgagaattatgcagcatttttttggtgtatgtgggccccaaatgaagtgcaggtcaaaccttgacagtgacgacaaatcgttgggcgggtccagggcgaattttgcgacaacatgtcgaggctcagcaggaccggcatgcaagctagcttactagtgatattctatagtgtcacctaaat

SEQ ID NO: 287 - DNA, 4326 bp, synthetic construct
  source 1..4326: mol_type = other DNA; note = pAGS-0017 CAM 35S promoter
acctcctactccaaaaatgtcaaagatacagtctcagaagaccaaagggctattgagacttttcaacaaagggtaatatcgggaaacctcctcggattccattgcccagctatctgtcacttcatcaaaaggacagtagaaaaggaaggtggcacctacaaatgccatcattgcgataaaggaaaggctatcgttcaagatgcccctgccgacagtggtcccaaagatggacccccacccacgaggagcatcgtggaaaaagaagacgttccaaccacgtcttcaaagcaagtggattgatgtgatatctccactgacgtaagggatgacgcacaatcccactatccttcgcaagacccttcctctatataaggaagttcatttcatttggagaggacagccaacagtattcagtcgactggtaccaacaggctatggtgagcaagggcgaggagctgttcaccggcgtggtgcccatcctggtggagctggacggcgacgtgaacggccacaagttcagcgtgagcggcgagggcgagggcgacgccacctacggcaagctgaccctgaagttcatctgcaccaccggcaagctgcccgtgccctggcccaccctggtgaccaccctgacctacggcgtgcagtgcttcagccgctaccccgaccacatgaagcagcacgacttcttcaagagcgccatgcccgagggctacgtgcaggagcgcaccatcttcttcaaggacgacggcaactacaagacccgcgccgaggtgaagttcgagggcgacaccctggtgaaccgcatcgagctgaagggcatcgacttcaaggaggacggcaacatcctgggccacaagctggagtacaactacaacagccacaacgtgtacatcatggccgacaagcagaagaacggcatcaaggtgaacttcaagatccgccacaacatcgaggacggcagcgtgcagctggccgaccactaccagcagaacacccccatcggcgacggccccgtgctgctgcccgacaaccactacctgagcacccagagcgccctgagcaaggaccccaacgagaagcgcgaccacatggtgctgctggagttcgtgaccgccgccggcatcaccctgggcatggacgagctgtacaagtcaggtggatcctagataacctttaccttcattccctgtaaattggtaccctgcaaagctttcgttcgtatcatcggtttcgacaacgttcgtcaagttcaatgcatcagtttcattgcgcacacaccagaatcctactgagtttgagtattatggcattgggaaaactgtttttcttgtaccatttgttgtgcttgtaatttactgtgttttttattcggttttcgctatcgaactgtgaaatggaaatggatggagaagagttaatgaatgatatggtccttttgttcattctcaaattaatattatttgttttttctcttatttgttgtgtgttgaatttgaaattataagagatatgcaaacattttgttttgagtaaaaatgtgtcaaatcgtggcctctaatgaccgaagttaatatgaggagtaaaacacttgtagttgtaccattatgcttattcactaggcaacaaatatattttcagacctagaaaagctgcaaatgttactgaatacaagtatgtcctcttgtgttttagacatttatgaactttcctttatgtaattttccagaatccttgtcagattctaatcattgctttataattatagttatactcatggatttgtagttgagtatgaaaatattttttaatgcattttatgacttgccaattgattgacaacatgcatcaatcgactagtcgacgagtcagtaataaacggcgtcaaagtggttgcagccggcacacacgagtcgtgtttatcaactcaaagcacaaatacttttcctcaacctaaaaataaggcaattagccaaaaacaactttgcgtgtaaacaacgctcaatacacgtgtcattttattattagctattgcttcaccgccttagctttctcgtgacctagtcgtcctcgtcttttcttcttcttcttctataaaacaatacccaaagagctcttcttcttcacaattcagatttcaatttctcaaaatcttaaaaactttctctcaattctctctaccgtgatcaaggtaaatttctgtgttccttattctctcaaaatcttcgattttgttttcgttcgatcccaatttcgtatatgttctttggtttagattctgttaatcttagatcgaagacgattttctgggtttgatcgttagatatcatcttaattctcgattagggtttcatagatatcatccgatttgttcaaataatttgagttttgtcgaataattactcttcgatttgtgatttctatctagatctggtgttagtttctagtttgtgcgatcgaatttgtagattaatctgagtttttctgattaacaccacaccaatctggtaccagaaaaggggagaagcaaaaccatgggtaaaaagcctgaactcaccgcgacgtctgtcgagaagtttctgatcgaaaagttcgacagcgtctccgacctgatgcagctctcggagggcgaagaatctcgtgctttcagcttcgatgtaggagggcgtggatatgtcctgcgggtaaatagctgcgccgatggtttctacaaagatcgttatgtttatcggcactttgcatcggccgcgctcccgattccggaagtgcttgacattggggcattcagcgagagcctgacctattgcatctcccgccgtgcacagggtgtcacgttgcaagacctgcctgaaaccgaactgcccgctgttctgcaaccggtcgcggaggcgatggatgccatcgctgcggccgatcttagccagacgagcgggttcggcccattcggaccgcaaggaatcggtcaatacactacatggcgtgatttcatatgcgcgattgctgatccccatgtgtatcactggcaaactgtgatggacgacaccgtcagtgcgtccgtcgcgcaggctctcgatgagctgatgctttgggccgaggactgccccgaagtccggcacctcgtgcacgcggatttcggctccaacaatgtcctgacggacaatggccgcataacagcggtcattgactggagcgaggcgatgttcggggattcccaatacgaggtcgccaacatcttcttctggaggccgtggttggcttgtatggagcagcagacgcgctacttcgagcggaggcatccggagcttgcaggatcgccgcggctccgggcgtatatgctccgcattggtcttgaccaactctatcagagcttggttgacggcaatttcgatgatgcagcttgggcgcagggtcgatgcgacgcaatcgtccgatccggagccgggactgtcgggcgtacacaaatcgcccgcagaagcgcggccgtctggaccgatggctgtgtagaagtactcgccgatagtggaaaccgacgccccagcactcgtccgagggcaaaggaatagatgcatcctgctttaatgagatatgcgagacgcctatgatcgcatgatatttgctttcaattctgttgtgcacgttgtaaaaaacctgagcatgtgtagctcagatccttaccgccggtttcggttcattctaatgaatatatcacccgttactatcgtatttttatgaataatattctccgttcaatttactgattgtaccctactacttatatgtacaatattaaaatgaaaacaatatattgtgctgaataggtttatagcgacatctatgatagagcgccacaataacaaacaattgcgttttattattacaaatccaattttaaaaaaagcggcagaaccggtcaaacctaaaagactgattacataaatcttattcaaatttcaaaagtgccccaggggctagtatctacgacacaccgagcggcgaactaataacgctcactgaagggaactccggttccccgccggcgcgcatgggtgagattccttgaagttgagtattggccgtccgctctaccgaaagttacgggcaccattcaacccggtccagcacggcggccgggtaaccgacttgctgccccgagaattatgcagcatttttttggtgtatgtgggccccaaatgaagtgcaggtcaaaccttgacagtgacgacaaatcgttgggcgggtccagggcgaattttgcgacaacatgtcgaggctcagcaggaccggcatgcaagctagcttactagtgatattctatagtgtcacctaaat

SEQ ID NO: 288 - DNA, 4352 bp, synthetic construct
  source 1..4352: mol_type = other DNA; note = pAGS-0018 MAS promoter
acctgtgtaatgtattggtaatttgggaagatataataggaagcaaggctatttatccatttctgaaaaggcgaaatggcgtcaccgcgagcgtcacgcgcattccgttcttgctgtaaagcgttgtttggtacacttttgactagcgaggcttggcgtgtcagcgtatctattcaaaagtcgttaatggctgcggatcaagaaaaagttggaatagaaacagaatacccgcgaaattcaggcccggttgccatgtcctacacgccgaaataaacgaccaaattagtagaaaaataaaaactgactcggatacttacgtcacgtcttgcgcactgatttgaaaaatctcaatataaacaaagacggccacaagaaaaaaccaaaacaccgatattcattaatcttatctagtttctcaaaaaaatcataacagtattcagtcgactggtaccaacaggctatggtgagcaagggcgaggagctgttcaccggcgtggtgcccatcctggtggagctggacggcgacgtgaacggccacaagttcagcgtgagcggcgagggcgagggcgacgccacctacggcaagctgaccctgaagttcatctgcaccaccggcaagctgcccgtgccctggcccaccctggtgaccaccctgacctacggcgtgcagtgcttcagccgctaccccgaccacatgaagcagcacgacttcttcaagagcgccatgcccgagggctacgtgcaggagcgcaccatcttcttcaaggacgacggcaactacaagacccgcgccgaggtgaagttcgagggcgacaccctggtgaaccgcatcgagctgaagggcatcgacttcaaggaggacggcaacatcctgggccacaagctggagtacaactacaacagccacaacgtgtacatcatggccgacaagcagaagaacggcatcaaggtgaacttcaagatccgccacaacatcgaggacggcagcgtgcagctggccgaccactaccagcagaacacccccatcggcgacggccccgtgctgctgcccgacaaccactacctgagcacccagagcgccctgagcaaggaccccaacgagaagcgcgaccacatggtgctgctggagttcgtgaccgccgccggcatcaccctgggcatggacgagctgtacaagtcaggtggatcctagataacctttaccttcattccctgtaaattggtaccctgcaaagctttcgttcgtatcatcggtttcgacaacgttcgtcaagttcaatgcatcagtttcattgcgcacacaccagaatcctactgagtttgagtattatggcattgggaaaactgtttttcttgtaccatttgttgtgcttgtaatttactgtgttttttattcggttttcgctatcgaactgtgaaatggaaatggatggagaagagttaatgaatgatatggtccttttgttcattctcaaattaatattatttgttttttctcttatttgttgtgtgttgaatttgaaattataagagatatgcaaacattttgttttgagtaaaaatgtgtcaaatcgtggcctctaatgaccgaagttaatatgaggagtaaaacacttgtagttgtaccattatgcttattcactaggcaacaaatatattttcagacctagaaaagctgcaaatgttactgaatacaagtatgtcctcttgtgttttagacatttatgaactttcctttatgtaattttccagaatccttgtcagattctaatcattgctttataattatagttatactcatggatttgtagttgagtatgaaaatattttttaatgcattttatgacttgccaattgattgacaacatgcatcaatcgactagtcgacgagtcagtaataaacggcgtcaaagtggttgcagccggcacacacgagtcgtgtttatcaactcaaagcacaaatacttttcctcaacctaaaaataaggcaattagccaaaaacaactttgcgtgtaaacaacgctcaatacacgtgtcattttattattagctattgcttcaccgccttagctttctcgtgacctagtcgtcctcgtcttttcttcttcttcttctataaaacaatacccaaagagctcttcttcttcacaattcagatttcaatttctcaaaatcttaaaaactttctctcaattctctctaccgtgatcaaggtaaatttctgtgttccttattctctcaaaatcttcgattttgttttcgttcgatcccaatttcgtatatgttctttggtttagattctgttaatcttagatcgaagacgattttctgggtttgatcgttagatatcatcttaattctcgattagggtttcatagatatcatccgatttgttcaaataatttgagttttgtcgaataattactcttcgatttgtgatttctatctagatctggtgttagtttctagtttgtgcgatcgaatttgtagattaatctgagtttttctgattaacaccacaccaatctggtaccagaaaaggggagaagcaaaaccatgggtaaaaagcctgaactcaccgcgacgtctgtcgagaagtttctgatcgaaaagttcgacagcgtctccgacctgatgcagctctcggagggcgaagaatctcgtgctttcagcttcgatgtaggagggcgtggatatgtcctgcgggtaaatagctgcgccgatggtttctacaaagatcgttatgtttatcggcactttgcatcggccgcgctcccgattccggaagtgcttgacattggggcattcagcgagagcctgacctattgcatctcccgccgtgcacagggtgtcacgttgcaagacctgcctgaaaccgaactgcccgctgttctgcaaccggtcgcggaggcgatggatgccatcgctgcggccgatcttagccagacgagcgggttcggcccattcggaccgcaaggaatcggtcaatacactacatggcgtgatttcatatgcgcgattgctgatccccatgtgtatcactggcaaactgtgatggacgacaccgtcagtgcgtccgtcgcgcaggctctcgatgagctgatgctttgggccgaggactgccccgaagtccggcacctcgtgcacgcggatttcggctccaacaatgtcctgacggacaatggccgcataacagcggtcattgactggagcgaggcgatgttcggggattcccaatacgaggtcgccaacatcttcttctggaggccgtggttggcttgtatggagcagcagacgcgctacttcgagcggaggcatccggagcttgcaggatcgccgcggctccgggcgtatatgctccgcattggtcttgaccaactctatcagagcttggttgacggcaatttcgatgatgcagcttgggcgcagggtcgatgcgacgcaatcgtccgatccggagccgggactgtcgggcgtacacaaatcgcccgcagaagcgcggccgtctggaccgatggctgtgtagaagtactcgccgatagtggaaaccgacgccccagcactcgtccgagggcaaaggaatagatgcatcctgctttaatgagatatgcgagacgcctatgatcgcatgatatttgctttcaattctgttgtgcacgttgtaaaaaacctgagcatgtgtagctcagatccttaccgccggtttcggttcattctaatgaatatatcacccgttactatcgtatttttatgaataatattctccgttcaatttactgattgtaccctactacttatatgtacaatattaaaatgaaaacaatatattgtgctgaataggtttatagcgacatctatgatagagcgccacaataacaaacaattgcgttttattattacaaatccaattttaaaaaaagcggcagaaccggtcaaacctaaaagactgattacataaatcttattcaaatttcaaaagtgccccaggggctagtatctacgacacaccgagcggcgaactaataacgctcactgaagggaactccggttccccgccggcgcgcatgggtgagattccttgaagttgagtattggccgtccgctctaccgaaagttacgggcaccattcaacccggtccagcacggcggccgggtaaccgacttgctgccccgagaattatgcagcatttttttggtgtatgtgggccccaaatgaagtgcaggtcaaaccttgacagtgacgacaaatcgttgggcgggtccagggcgaattttgcgacaacatgtcgaggctcagcaggaccggcatgcaagctagcttactagtgatattctatagtgtcacctaaat

SEQ ID NO: 289 - DNA, 4421 bp, synthetic construct
  source 1..4421: mol_type = other DNA; note = pAGS-0019 PAR promoter
acctgctgaggcttgacatgattggtgcgtatgtttgtatgaagctacaggactgatttggcgggctatgagggcgggggaagctctggaagggccgcgatggggcgcgcggcgtccagaaggcgccatacggcccgctggcggcacccatccggtataaaagcccgcgaccccgaacggtgacctccactttcagcgacaaacgagcacttatacatacgcgactattctgccgctatacataaccactcagctagcttaagatcccatcaagcttgcatgccgggcgcgccagaaggagcgcagccaaaccaggatgatgtttgatggggtatttgagcacttgcaacccttatccggaagccccctggcccacaaaggctaggcgccaatgcaagcagttcgcatgcagcccctggagcggtgccctcctgataaaccggccagggggcctatgttctttacttttttacaagagaagtcactcaacatcttaaaacagtattcagtcgactggtaccaacaggctatggtgagcaagggcgaggagctgttcaccggcgtggtgcccatcctggtggagctggacggcgacgtgaacggccacaagttcagcgtgagcggcgagggcgagggcgacgccacctacggcaagctgaccctgaagttcatctgcaccaccggcaagctgcccgtgccctggcccaccctggtgaccaccctgacctacggcgtgcagtgcttcagccgctaccccgaccacatgaagcagcacgacttcttcaagagcgccatgcccgagggctacgtgcaggagcgcaccatcttcttcaaggacgacggcaactacaagacccgcgccgaggtgaagttcgagggcgacaccctggtgaaccgcatcgagctgaagggcatcgacttcaaggaggacggcaacatcctgggccacaagctggagtacaactacaacagccacaacgtgtacatcatggccgacaagcagaagaacggcatcaaggtgaacttcaagatccgccacaacatcgaggacggcagcgtgcagctggccgaccactaccagcagaacacccccatcggcgacggccccgtgctgctgcccgacaaccactacctgagcacccagagcgccctgagcaaggaccccaacgagaagcgcgaccacatggtgctgctggagttcgtgaccgccgccggcatcaccctgggcatggacgagctgtacaagtcaggtggatcctagataacctttaccttcattccctgtaaattggtaccctgcaaagctttcgttcgtatcatcggtttcgacaacgttcgtcaagttcaatgcatcagtttcattgcgcacacaccagaatcctactgagtttgagtattatggcattgggaaaactgtttttcttgtaccatttgttgtgcttgtaatttactgtgttttttattcggttttcgctatcgaactgtgaaatggaaatggatggagaagagttaatgaatgatatggtccttttgttcattctcaaattaatattatttgttttttctcttatttgttgtgtgttgaatttgaaattataagagatatgcaaacattttgttttgagtaaaaatgtgtcaaatcgtggcctctaatgaccgaagttaatatgaggagtaaaacacttgtagttgtaccattatgcttattcactaggcaacaaatatattttcagacctagaaaagctgcaaatgttactgaatacaagtatgtcctcttgtgttttagacatttatgaactttcctttatgtaattttccagaatccttgtcagattctaatcattgctttataattatagttatactcatggatttgtagttgagtatgaaaatattttttaatgcattttatgacttgccaattgattgacaacatgcatcaatcgactagtcgacgagtcagtaataaacggcgtcaaagtggttgcagccggcacacacgagtcgtgtttatcaactcaaagcacaaatacttttcctcaacctaaaaataaggcaattagccaaaaacaactttgcgtgtaaacaacgctcaatacacgtgtcattttattattagctattgcttcaccgccttagctttctcgtgacctagtcgtcctcgtcttttcttcttcttcttctataaaacaatacccaaagagctcttcttcttcacaattcagatttcaatttctcaaaatcttaaaaactttctctcaattctctctaccgtgatcaaggtaaatttctgtgttccttattctctcaaaatcttcgattttgttttcgttcgatcccaatttcgtatatgttctttggtttagattctgttaatcttagatcgaagacgattttctgggtttgatcgttagatatcatcttaattctcgattagggtttcatagatatcatccgatttgttcaaataatttgagttttgtcgaataattactcttcgatttgtgatttctatctagatctggtgttagtttctagtttgtgcgatcgaatttgtagattaatctgagtttttctgattaacaccacaccaatctggtaccagaaaaggggagaagcaaaaccatgggtaaaaagcctgaactcaccgcgacgtctgtcgagaagtttctgatcgaaaagttcgacagcgtctccgacctgatgcagctctcggagggcgaagaatctcgtgctttcagcttcgatgtaggagggcgtggatatgtcctgcgggtaaatagctgcgccgatggtttctacaaagatcgttatgtttatcggcactttgcatcggccgcgctcccgattccggaagtgcttgacattggggcattcagcgagagcctgacctattgcatctcccgccgtgcacagggtgtcacgttgcaagacctgcctgaaaccgaactgcccgctgttctgcaaccggtcgcggaggcgatggatgccatcgctgcggccgatcttagccagacgagcgggttcggcccattcggaccgcaaggaatcggtcaatacactacatggcgtgatttcatatgcgcgattgctgatccccatgtgtatcactggcaaactgtgatggacgacaccgtcagtgcgtccgtcgcgcaggctctcgatgagctgatgctttgggccgaggactgccccgaagtccggcacctcgtgcacgcggatttcggctccaacaatgtcctgacggacaatggccgcataacagcggtcattgactggagcgaggcgatgttcggggattcccaatacgaggtcgccaacatcttcttctggaggccgtggttggcttgtatggagcagcagacgcgctacttcgagcggaggcatccggagcttgcaggatcgccgcggctccgggcgtatatgctccgcattggtcttgaccaactctatcagagcttggttgacggcaatttcgatgatgcagcttgggcgcagggtcgatgcgacgcaatcgtccgatccggagccgggactgtcgggcgtacacaaatcgcccgcagaagcgcggccgtctggaccgatggctgtgtagaagtactcgccgatagtggaaaccgacgccccagcactcgtccgagggcaaaggaatagatgcatcctgctttaatgagatatgcgagacgcctatgatcgcatgatatttgctttcaattctgttgtgcacgttgtaaaaaacctgagcatgtgtagctcagatccttaccgccggtttcggttcattctaatgaatatatcacccgttactatcgtatttttatgaataatattctccgttcaatttactgattgtaccctactacttatatgtacaatattaaaatgaaaacaatatattgtgctgaataggtttatagcgacatctatgatagagcgccacaataacaaacaattgcgttttattattacaaatccaattttaaaaaaagcggcagaaccggtcaaacctaaaagactgattacataaatcttattcaaatttcaaaagtgccccaggggctagtatctacgacacaccgagcggcgaactaataacgctcactgaagggaactccggttccccgccggcgcgcatgggtgagattccttgaagttgagtattggccgtccgctctaccgaaagttacgggcaccattcaacccggtccagcacggcggccgggtaaccgacttgctgccccgagaattatgcagcatttttttggtgtatgtgggccccaaatgaagtgcaggtcaaaccttgacagtgacgacaaatcgttgggcgggtccagggcgaattttgcgacaacatgtcgaggctcagcaggaccggcatgcaagctagcttactagtgatattctatagtgtcacctaaat

SEQ ID NO: 290 - DNA, 4749 bp, synthetic construct
  source 1..4749: mol_type = other DNA; note = pAGS-0020 Cv PAS D promoter
acctgatcccacacacctgcccgtctgcctgacaggaagtgaacgcatgtcgagggaggcctcaccaatcgtcacacgagccctcgtcagaaacacgtctccgccacgctctccctctcactgccgaccccgcagcccttttgccctttcctaggccaccgacaggacccaggcgctctcagcatgcctcaacaacccgtactcgtgccagcggtgcccttgtgctggtgatcgcttggaagcgcatgcgaagacgaaggggcggagcaggcggcctggctgttcgaagggctcgccgccagttcgggtgcctttctccacgcgcgcctccacacctaccgatgcgtgaaggcaggcaaatgctcatgtttgcccgaactcggagtccttaaaaagccgcttcttgtcgtcgttccgagacatgttagcagatcgcagtgccacctttcctgacgcgctcggccccatattcggacgcaattgtcatttgtagcacaattggagcaaatctggcgaggcagtaggcttttaagttgcaaggcgagagagcaaagtgggacgcggcgtgattattggtatttacgcgacggcccggcgcgttagcggcccttcccccaggccagggacgattatgtatcaatattgttgcgttcgggcactcgtgcgagggctcctgcgggctggggagggggatctgggaattggaggtacgaccgagatggcttgctcggggggaggtttcctcgccgagcaagccagggttaggtgttgcgctcttgactcgttgtgcattctaggaccccactgctactcacaacaagccaaaacagtattcagtcgactggtaccaacaggctatggtgagcaagggcgaggagctgttcaccggcgtggtgcccatcctggtggagctggacggcgacgtgaacggccacaagttcagcgtgagcggcgagggcgagggcgacgccacctacggcaagctgaccctgaagttcatctgcaccaccggcaagctgcccgtgccctggcccaccctggtgaccaccctgacctacggcgtgcagtgcttcagccgctaccccgaccacatgaagcagcacgacttcttcaagagcgccatgcccgagggctacgtgcaggagcgcaccatcttcttcaaggacgacggcaactacaagacccgcgccgaggtgaagttcgagggcgacaccctggtgaaccgcatcgagctgaagggcatcgacttcaaggaggacggcaacatcctgggccacaagctggagtacaactacaacagccacaacgtgtacatcatggccgacaagcagaagaacggcatcaaggtgaacttcaagatccgccacaacatcgaggacggcagcgtgcagctggccgaccactaccagcagaacacccccatcggcgacggccccgtgctgctgcccgacaaccactacctgagcacccagagcgccctgagcaaggaccccaacgagaagcgcgaccacatggtgctgctggagttcgtgaccgccgccggcatcaccctgggcatggacgagctgtacaagtcaggtggatcctagataacctttaccttcattccctgtaaattggtaccctgcaaagctttcgttcgtatcatcggtttcgacaacgttcgtcaagttcaatgcatcagtttcattgcgcacacaccagaatcctactgagtttgagtattatggcattgggaaaactgtttttcttgtaccatttgttgtgcttgtaatttactgtgttttttattcggttttcgctatcgaactgtgaaatggaaatggatggagaagagttaatgaatgatatggtccttttgttcattctcaaattaatattatttgttttttctcttatttgttgtgtgttgaatttgaaattataagagatatgcaaacattttgttttgagtaaaaatgtgtcaaatcgtggcctctaatgaccgaagttaatatgaggagtaaaacacttgtagttgtaccattatgcttattcactaggcaacaaatatattttcagacctagaaaagctgcaaatgttactgaatacaagtatgtcctcttgtgttttagacatttatgaactttcctttatgtaattttccagaatccttgtcagattctaatcattgctttataattatagttatactcatggatttgtagttgagtatgaaaatattttttaatgcattttatgacttgccaattgattgacaacatgcatcaatcgactagtcgacgagtcagtaataaacggcgtcaaagtggttgcagccggcacacacgagtcgtgtttatcaactcaaagcacaaatacttttcctcaacctaaaaataaggcaattagccaaaaacaactttgcgtgtaaacaacgctcaatacacgtgtcattttattattagctattgcttcaccgccttagctttctcgtgacctagtcgtcctcgtcttttcttcttcttcttctataaaacaatacccaaagagctcttcttcttcacaattcagatttcaatttctcaaaatcttaaaaactttctctcaattctctctaccgtgatcaaggtaaatttctgtgttccttattctctcaaaatcttcgattttgttttcgttcgatcccaatttcgtatatgttctttggtttagattctgttaatcttagatcgaagacgattttctgggtttgatcgttagatatcatcttaattctcgattagggtttcatagatatcatccgatttgttcaaataatttgagttttgtcgaataattactcttcgatttgtgatttctatctagatctggtgttagtttctagtttgtgcgatcgaatttgtagattaatctgagtttttctgattaacaccacaccaatctggtaccagaaaaggggagaagcaaaaccatgggtaaaaagcctgaactcaccgcgacgtctgtcgagaagtttctgatcgaaaagttcgacagcgtctccgacctgatgcagctctcggagggcgaagaatctcgtgctttcagcttcgatgtaggagggcgtggatatgtcctgcgggtaaatagctgcgccgatggtttctacaaagatcgttatgtttatcggcactttgcatcggccgcgctcccgattccggaagtgcttgacattggggcattcagcgagagcctgacctattgcatctcccgccgtgcacagggtgtcacgttgcaagacctgcctgaaaccgaactgcccgctgttctgcaaccggtcgcggaggcgatggatgccatcgctgcggccgatcttagccagacgagcgggttcggcccattcggaccgcaaggaatcggtcaatacactacatggcgtgatttcatatgcgcgattgctgatccccatgtgtatcactggcaaactgtgatggacgacaccgtcagtgcgtccgtcgcgcaggctctcgatgagctgatgctttgggccgaggactgccccgaagtccggcacctcgtgcacgcggatttcggctccaacaatgtcctgacggacaatggccgcataacagcggtcattgactggagcgaggcgatgttcggggattcccaatacgaggtcgccaacatcttcttctggaggccgtggttggcttgtatggagcagcagacgcgctacttcgagcggaggcatccggagcttgcaggatcgccgcggctccgggcgtatatgctccgcattggtcttgaccaactctatcagagcttggttgacggcaatttcgatgatgcagcttgggcgcagggtcgatgcgacgcaatcgtccgatccggagccgggactgtcgggcgtacacaaatcgcccgcagaagcgcggccgtctggaccgatggctgtgtagaagtactcgccgatagtggaaaccgacgccccagcactcgtccgagggcaaaggaatagatgcatcctgctttaatgagatatgcgagacgcctatgatcgcatgatatttgctttcaattctgttgtgcacgttgtaaaaaacctgagcatgtgtagctcagatccttaccgccggtttcggttcattctaatgaatatatcacccgttactatcgtatttttatgaataatattctccgttcaatttactgattgtaccctactacttatatgtacaatattaaaatgaaaacaatatattgtgctgaataggtttatagcgacatctatgatagagcgccacaataacaaacaattgcgttttattattacaaatccaattttaaaaaaagcggcagaaccggtcaaacctaaaagactgattacataaatcttattcaaatttcaaaagtgccccaggggctagtatctacgacacaccgagcggcgaactaataacgctcactgaagggaactccggttccccgccggcgcgcatgggtgagattccttgaagttgagtattggccgtccgctctaccgaaagttacgggcaccattcaacccggtccagcacggcggccgggtaaccgacttgctgccccgagaattatgcagcatttttttggtgtatgtgggccccaaatgaagtgcaggtcaaaccttgacagtgacgacaaatcgttgggcgggtccagggcgaattttgcgacaacatgtcgaggctcagcaggaccggcatgcaagctagcttactagtgatattctatagtgtcacctaaat

SEQ ID NO: 291 - DNA, 4132 bp, synthetic construct
  source 1..4132: mol_type = other DNA; note = pAGS-0021 CMV promoter
acctgtgatgcggttttggcagtacatcaatgggcgtggatagcggtttgactcacggggatttccaagtctccaccccattgacgtcaatgggagtttgttttggcaccaaaatcaacgggactttccaaaatgtcgtaacaactccgccccattgacgcaaatgggcggtaggcgtgtacggtgggaggtctatataagcagagctaacagtattcagtcgactggtaccaacaggctatggtgagcaagggcgaggagctgttcaccggcgtggtgcccatcctggtggagctggacggcgacgtgaacggccacaagttcagcgtgagcggcgagggcgagggcgacgccacctacggcaagctgaccctgaagttcatctgcaccaccggcaagctgcccgtgccctggcccaccctggtgaccaccctgacctacggcgtgcagtgcttcagccgctaccccgaccacatgaagcagcacgacttcttcaagagcgccatgcccgagggctacgtgcaggagcgcaccatcttcttcaaggacgacggcaactacaagacccgcgccgaggtgaagttcgagggcgacaccctggtgaaccgcatcgagctgaagggcatcgacttcaaggaggacggcaacatcctgggccacaagctggagtacaactacaacagccacaacgtgtacatcatggccgacaagcagaagaacggcatcaaggtgaacttcaagatccgccacaacatcgaggacggcagcgtgcagctggccgaccactaccagcagaacacccccatcggcgacggccccgtgctgctgcccgacaaccactacctgagcacccagagcgccctgagcaaggaccccaacgagaagcgcgaccacatggtgctgctggagttcgtgaccgccgccggcatcaccctgggcatggacgagctgtacaagtcaggtggatcctagataacctttaccttcattccctgtaaattggtaccctgcaaagctttcgttcgtatcatcggtttcgacaacgttcgtcaagttcaatgcatcagtttcattgcgcacacaccagaatcctactgagtttgagtattatggcattgggaaaactgtttttcttgtaccatttgttgtgcttgtaatttactgtgttttttattcggttttcgctatcgaactgtgaaatggaaatggatggagaagagttaatgaatgatatggtccttttgttcattctcaaattaatattatttgttttttctcttatttgttgtgtgttgaatttgaaattataagagatatgcaaacattttgttttgagtaaaaatgtgtcaaatcgtggcctctaatgaccgaagttaatatgaggagtaaaacacttgtagttgtaccattatgcttattcactaggcaacaaatatattttcagacctagaaaagctgcaaatgttactgaatacaagtatgtcctcttgtgttttagacatttatgaactttcctttatgtaattttccagaatccttgtcagattctaatcattgctttataattatagttatactcatggatttgtagttgagtatgaaaatattttttaatgcattttatgacttgccaattgattgacaacatgcatcaatcgactagtcgacgagtcagtaataaacggcgtcaaagtggttgcagccggcacacacgagtcgtgtttatcaactcaaagcacaaatacttttcctcaacctaaaaataaggcaattagccaaaaacaactttgcgtgtaaacaacgctcaatacacgtgtcattttattattagctattgcttcaccgccttagctttctcgtgacctagtcgtcctcgtcttttcttcttcttcttctataaaacaatacccaaagagctcttcttcttcacaattcagatttcaatttctcaaaatcttaaaaactttctctcaattctctctaccgtgatcaaggtaaatttctgtgttccttattctctcaaaatcttcgattttgttttcgttcgatcccaatttcgtatatgttctttggtttagattctgttaatcttagatcgaagacgattttctgggtttgatcgttagatatcatcttaattctcgattagggtttcatagatatcatccgatttgttcaaataatttgagttttgtcgaataattactcttcgatttgtgatttctatctagatctggtgttagtttctagtttgtgcgatcgaatttgtagattaatctgagtttttctgattaacaccacaccaatctggtaccagaaaaggggagaagcaaaaccatgggtaaaaagcctgaactcaccgcgacgtctgtcgagaagtttctgatcgaaaagttcgacagcgtctccgacctgatgcagctctcggagggcgaagaatctcgtgctttcagcttcgatgtaggagggcgtggatatgtcctgcgggtaaatagctgcgccgatggtttctacaaagatcgttatgtttatcggcactttgcatcggccgcgctcccgattccggaagtgcttgacattggggcattcagcgagagcctgacctattgcatctcccgccgtgcacagggtgtcacgttgcaagacctgcctgaaaccgaactgcccgctgttctgcaaccggtcgcggaggcgatggatgccatcgctgcggccgatcttagccagacgagcgggttcggcccattcggaccgcaaggaatcggtcaatacactacatggcgtgatttcatatgcgcgattgctgatccccatgtgtatcactggcaaactgtgatggacgacaccgtcagtgcgtccgtcgcgcaggctctcgatgagctgatgctttgggccgaggactgccccgaagtccggcacctcgtgcacgcggatttcggctccaacaatgtcctgacggacaatggccgcataacagcggtcattgactggagcgaggcgatgttcggggattcccaatacgaggtcgccaacatcttcttctggaggccgtggttggcttgtatggagcagcagacgcgctacttcgagcggaggcatccggagcttgcaggatcgccgcggctccgggcgtatatgctccgcattggtcttgaccaactctatcagagcttggttgacggcaatttcgatgatgcagcttgggcgcagggtcgatgcgacgcaatcgtccgatccggagccgggactgtcgggcgtacacaaatcgcccgcagaagcgcggccgtctggaccgatggctgtgtagaagtactcgccgatagtggaaaccgacgccccagcactcgtccgagggcaaaggaatagatgcatcctgctttaatgagatatgcgagacgcctatgatcgcatgatatttgctttcaattctgttgtgcacgttgtaaaaaacctgagcatgtgtagctcagatccttaccgccggtttcggttcattctaatgaatatatcacccgttactatcgtatttttatgaataatattctccgttcaatttactgattgtaccctactacttatatgtacaatattaaaatgaaaacaatatattgtgctgaataggtttatagcgacatctatgatagagcgccacaataacaaacaattgcgttttattattacaaatccaattttaaaaaaagcggcagaaccggtcaaacctaaaagactgattacataaatcttattcaaatttcaaaagtgccccaggggctagtatctacgacacaccgagcggcgaactaataacgctcactgaagggaactccggttccccgccggcgcgcatgggtgagattccttgaagttgagtattggccgtccgctctaccgaaagttacgggcaccattcaacccggtccagcacggcggccgggtaaccgacttgctgccccgagaattatgcagcatttttttggtgtatgtgggccccaaatgaagtgcaggtcaaaccttgacagtgacgacaaatcgttgggcgggtccagggcgaattttgcgacaacatgtcgaggctcagcaggaccggcatgcaagctagcttactagtgatattctatagtgtcacctaaat

SEQ ID NO: 292 - DNA, 4436 bp, synthetic construct
  source 1..4436: mol_type = other DNA; note = pAGS-0022 CMV promoter +enhancer
acctcgttacataacttacggtaaatggcccgcctggctgaccgcccaacgacccccgcccattgacgtcaataatgacgtatgttcccatagtaacgccaatagggactttccattgacgtcaatgggtggagtatttacggtaaactgcccacttggcagtacatcaagtgtatcatatgccaagtacgccccctattgacgtcaatgacggtaaatggcccgcctggcattatgcccagtacatgaccttatgggactttcctacttggcagtacatctacgtattagtcatcgctattaccatggtgatgcggttttggcagtacatcaatgggcgtggatagcggtttgactcacggggatttccaagtctccaccccattgacgtcaatgggagtttgttttggcaccaaaatcaacgggactttccaaaatgtcgtaacaactccgccccattgacgcaaatgggcggtaggcgtgtacggtgggaggtctatataagcagagctaacagtattcagtcgactggtaccaacaggctatggtgagcaagggcgaggagctgttcaccggcgtggtgcccatcctggtggagctggacggcgacgtgaacggccacaagttcagcgtgagcggcgagggcgagggcgacgccacctacggcaagctgaccctgaagttcatctgcaccaccggcaagctgcccgtgccctggcccaccctggtgaccaccctgacctacggcgtgcagtgcttcagccgctaccccgaccacatgaagcagcacgacttcttcaagagcgccatgcccgagggctacgtgcaggagcgcaccatcttcttcaaggacgacggcaactacaagacccgcgccgaggtgaagttcgagggcgacaccctggtgaaccgcatcgagctgaagggcatcgacttcaaggaggacggcaacatcctgggccacaagctggagtacaactacaacagccacaacgtgtacatcatggccgacaagcagaagaacggcatcaaggtgaacttcaagatccgccacaacatcgaggacggcagcgtgcagctggccgaccactaccagcagaacacccccatcggcgacggccccgtgctgctgcccgacaaccactacctgagcacccagagcgccctgagcaaggaccccaacgagaagcgcgaccacatggtgctgctggagttcgtgaccgccgccggcatcaccctgggcatggacgagctgtacaagtcaggtggatcctagataacctttaccttcattccctgtaaattggtaccctgcaaagctttcgttcgtatcatcggtttcgacaacgttcgtcaagttcaatgcatcagtttcattgcgcacacaccagaatcctactgagtttgagtattatggcattgggaaaactgtttttcttgtaccatttgttgtgcttgtaatttactgtgttttttattcggttttcgctatcgaactgtgaaatggaaatggatggagaagagttaatgaatgatatggtccttttgttcattctcaaattaatattatttgttttttctcttatttgttgtgtgttgaatttgaaattataagagatatgcaaacattttgttttgagtaaaaatgtgtcaaatcgtggcctctaatgaccgaagttaatatgaggagtaaaacacttgtagttgtaccattatgcttattcactaggcaacaaatatattttcagacctagaaaagctgcaaatgttactgaatacaagtatgtcctcttgtgttttagacatttatgaactttcctttatgtaattttccagaatccttgtcagattctaatcattgctttataattatagttatactcatggatttgtagttgagtatgaaaatattttttaatgcattttatgacttgccaattgattgacaacatgcatcaatcgactagtcgacgagtcagtaataaacggcgtcaaagtggttgcagccggcacacacgagtcgtgtttatcaactcaaagcacaaatacttttcctcaacctaaaaataaggcaattagccaaaaacaactttgcgtgtaaacaacgctcaatacacgtgtcattttattattagctattgcttcaccgccttagctttctcgtgacctagtcgtcctcgtcttttcttcttcttcttctataaaacaatacccaaagagctcttcttcttcacaattcagatttcaatttctcaaaatcttaaaaactttctctcaattctctctaccgtgatcaaggtaaatttctgtgttccttattctctcaaaatcttcgattttgttttcgttcgatcccaatttcgtatatgttctttggtttagattctgttaatcttagatcgaagacgattttctgggtttgatcgttagatatcatcttaattctcgattagggtttcatagatatcatccgatttgttcaaataatttgagttttgtcgaataattactcttcgatttgtgatttctatctagatctggtgttagtttctagtttgtgcgatcgaatttgtagattaatctgagtttttctgattaacaccacaccaatctggtaccagaaaaggggagaagcaaaaccatgggtaaaaagcctgaactcaccgcgacgtctgtcgagaagtttctgatcgaaaagttcgacagcgtctccgacctgatgcagctctcggagggcgaagaatctcgtgctttcagcttcgatgtaggagggcgtggatatgtcctgcgggtaaatagctgcgccgatggtttctacaaagatcgttatgtttatcggcactttgcatcggccgcgctcccgattccggaagtgcttgacattggggcattcagcgagagcctgacctattgcatctcccgccgtgcacagggtgtcacgttgcaagacctgcctgaaaccgaactgcccgctgttctgcaaccggtcgcggaggcgatggatgccatcgctgcggccgatcttagccagacgagcgggttcggcccattcggaccgcaaggaatcggtcaatacactacatggcgtgatttcatatgcgcgattgctgatccccatgtgtatcactggcaaactgtgatggacgacaccgtcagtgcgtccgtcgcgcaggctctcgatgagctgatgctttgggccgaggactgccccgaagtccggcacctcgtgcacgcggatttcggctccaacaatgtcctgacggacaatggccgcataacagcggtcattgactggagcgaggcgatgttcggggattcccaatacgaggtcgccaacatcttcttctggaggccgtggttggcttgtatggagcagcagacgcgctacttcgagcggaggcatccggagcttgcaggatcgccgcggctccgggcgtatatgctccgcattggtcttgaccaactctatcagagcttggttgacggcaatttcgatgatgcagcttgggcgcagggtcgatgcgacgcaatcgtccgatccggagccgggactgtcgggcgtacacaaatcgcccgcagaagcgcggccgtctggaccgatggctgtgtagaagtactcgccgatagtggaaaccgacgccccagcactcgtccgagggcaaaggaatagatgcatcctgctttaatgagatatgcgagacgcctatgatcgcatgatatttgctttcaattctgttgtgcacgttgtaaaaaacctgagcatgtgtagctcagatccttaccgccggtttcggttcattctaatgaatatatcacccgttactatcgtatttttatgaataatattctccgttcaatttactgattgtaccctactacttatatgtacaatattaaaatgaaaacaatatattgtgctgaataggtttatagcgacatctatgatagagcgccacaataacaaacaattgcgttttattattacaaatccaattttaaaaaaagcggcagaaccggtcaaacctaaaagactgattacataaatcttattcaaatttcaaaagtgccccaggggctagtatctacgacacaccgagcggcgaactaataacgctcactgaagggaactccggttccccgccggcgcgcatgggtgagattccttgaagttgagtattggccgtccgctctaccgaaagttacgggcaccattcaacccggtccagcacggcggccgggtaaccgacttgctgccccgagaattatgcagcatttttttggtgtatgtgggccccaaatgaagtgcaggtcaaaccttgacagtgacgacaaatcgttgggcgggtccagggcgaattttgcgacaacatgtcgaggctcagcaggaccggcatgcaagctagcttactagtgatattctatagtgtcacctaaat

SEQ ID NO: 293 - DNA, 4286 bp, synthetic construct
  source 1..4286: mol_type = other DNA; note = pAGS-0023 SV40 promoter
acctctgaggcggaaagaaccagctgtggaatgtgtgtcagttagggtgtggaaagtccccaggctccccagcaggcagaagtatgcaaagcatgcatctcaattagtcagcaaccaggtgtggaaagtccccaggctccccagcaggcagaagtatgcaaagcatgcatctcaattagtcagcaaccatagtcccgcccctaactccgcccatcccgcccctaactccgcccagttccgcccattctccgccccatggctgactaattttttttatttatgcagaggccgaggccgcctcggcctctgagctattccagaagtagtgaggaggcttttttggaggcctaggcttttgcaaaaacagtattcagtcgactggtaccaacaggctatggtgagcaagggcgaggagctgttcaccggcgtggtgcccatcctggtggagctggacggcgacgtgaacggccacaagttcagcgtgagcggcgagggcgagggcgacgccacctacggcaagctgaccctgaagttcatctgcaccaccggcaagctgcccgtgccctggcccaccctggtgaccaccctgacctacggcgtgcagtgcttcagccgctaccccgaccacatgaagcagcacgacttcttcaagagcgccatgcccgagggctacgtgcaggagcgcaccatcttcttcaaggacgacggcaactacaagacccgcgccgaggtgaagttcgagggcgacaccctggtgaaccgcatcgagctgaagggcatcgacttcaaggaggacggcaacatcctgggccacaagctggagtacaactacaacagccacaacgtgtacatcatggccgacaagcagaagaacggcatcaaggtgaacttcaagatccgccacaacatcgaggacggcagcgtgcagctggccgaccactaccagcagaacacccccatcggcgacggccccgtgctgctgcccgacaaccactacctgagcacccagagcgccctgagcaaggaccccaacgagaagcgcgaccacatggtgctgctggagttcgtgaccgccgccggcatcaccctgggcatggacgagctgtacaagtcaggtggatcctagataacctttaccttcattccctgtaaattggtaccctgcaaagctttcgttcgtatcatcggtttcgacaacgttcgtcaagttcaatgcatcagtttcattgcgcacacaccagaatcctactgagtttgagtattatggcattgggaaaactgtttttcttgtaccatttgttgtgcttgtaatttactgtgttttttattcggttttcgctatcgaactgtgaaatggaaatggatggagaagagttaatgaatgatatggtccttttgttcattctcaaattaatattatttgttttttctcttatttgttgtgtgttgaatttgaaattataagagatatgcaaacattttgttttgagtaaaaatgtgtcaaatcgtggcctctaatgaccgaagttaatatgaggagtaaaacacttgtagttgtaccattatgcttattcactaggcaacaaatatattttcagacctagaaaagctgcaaatgttactgaatacaagtatgtcctcttgtgttttagacatttatgaactttcctttatgtaattttccagaatccttgtcagattctaatcattgctttataattatagttatactcatggatttgtagttgagtatgaaaatattttttaatgcattttatgacttgccaattgattgacaacatgcatcaatcgactagtcgacgagtcagtaataaacggcgtcaaagtggttgcagccggcacacacgagtcgtgtttatcaactcaaagcacaaatacttttcctcaacctaaaaataaggcaattagccaaaaacaactttgcgtgtaaacaacgctcaatacacgtgtcattttattattagctattgcttcaccgccttagctttctcgtgacctagtcgtcctcgtcttttcttcttcttcttctataaaacaatacccaaagagctcttcttcttcacaattcagatttcaatttctcaaaatcttaaaaactttctctcaattctctctaccgtgatcaaggtaaatttctgtgttccttattctctcaaaatcttcgattttgttttcgttcgatcccaatttcgtatatgttctttggtttagattctgttaatcttagatcgaagacgattttctgggtttgatcgttagatatcatcttaattctcgattagggtttcatagatatcatccgatttgttcaaataatttgagttttgtcgaataattactcttcgatttgtgatttctatctagatctggtgttagtttctagtttgtgcgatcgaatttgtagattaatctgagtttttctgattaacaccacaccaatctggtaccagaaaaggggagaagcaaaaccatgggtaaaaagcctgaactcaccgcgacgtctgtcgagaagtttctgatcgaaaagttcgacagcgtctccgacctgatgcagctctcggagggcgaagaatctcgtgctttcagcttcgatgtaggagggcgtggatatgtcctgcgggtaaatagctgcgccgatggtttctacaaagatcgttatgtttatcggcactttgcatcggccgcgctcccgattccggaagtgcttgacattggggcattcagcgagagcctgacctattgcatctcccgccgtgcacagggtgtcacgttgcaagacctgcctgaaaccgaactgcccgctgttctgcaaccggtcgcggaggcgatggatgccatcgctgcggccgatcttagccagacgagcgggttcggcccattcggaccgcaaggaatcggtcaatacactacatggcgtgatttcatatgcgcgattgctgatccccatgtgtatcactggcaaactgtgatggacgacaccgtcagtgcgtccgtcgcgcaggctctcgatgagctgatgctttgggccgaggactgccccgaagtccggcacctcgtgcacgcggatttcggctccaacaatgtcctgacggacaatggccgcataacagcggtcattgactggagcgaggcgatgttcggggattcccaatacgaggtcgccaacatcttcttctggaggccgtggttggcttgtatggagcagcagacgcgctacttcgagcggaggcatccggagcttgcaggatcgccgcggctccgggcgtatatgctccgcattggtcttgaccaactctatcagagcttggttgacggcaatttcgatgatgcagcttgggcgcagggtcgatgcgacgcaatcgtccgatccggagccgggactgtcgggcgtacacaaatcgcccgcagaagcgcggccgtctggaccgatggctgtgtagaagtactcgccgatagtggaaaccgacgccccagcactcgtccgagggcaaaggaatagatgcatcctgctttaatgagatatgcgagacgcctatgatcgcatgatatttgctttcaattctgttgtgcacgttgtaaaaaacctgagcatgtgtagctcagatccttaccgccggtttcggttcattctaatgaatatatcacccgttactatcgtatttttatgaataatattctccgttcaatttactgattgtaccctactacttatatgtacaatattaaaatgaaaacaatatattgtgctgaataggtttatagcgacatctatgatagagcgccacaataacaaacaattgcgttttattattacaaatccaattttaaaaaaagcggcagaaccggtcaaacctaaaagactgattacataaatcttattcaaatttcaaaagtgccccaggggctagtatctacgacacaccgagcggcgaactaataacgctcactgaagggaactccggttccccgccggcgcgcatgggtgagattccttgaagttgagtattggccgtccgctctaccgaaagttacgggcaccattcaacccggtccagcacggcggccgggtaaccgacttgctgccccgagaattatgcagcatttttttggtgtatgtgggccccaaatgaagtgcaggtcaaaccttgacagtgacgacaaatcgttgggcgggtccagggcgaattttgcgacaacatgtcgaggctcagcaggaccggcatgcaagctagcttactagtgatattctatagtgtcacctaaat

SEQ ID NO: 294 - DNA, 4392 bp, synthetic construct
  source 1..4392: mol_type = other DNA; note = pAGS-0024 SV40 promoter + enhancer
acctcgcggaacccctatttgtttatttttctaaatacattcaaatatgtatccgctcatgagacaataaccctgataaatgcttcaataatattgaaaaaggaagagtcctgaggcggaaagaaccagctgtggaatgtgtgtcagttagggtgtggaaagtccccaggctccccagcaggcagaagtatgcaaagcatgcatctcaattagtcagcaaccaggtgtggaaagtccccaggctccccagcaggcagaagtatgcaaagcatgcatctcaattagtcagcaaccatagtcccgcccctaactccgcccatcccgcccctaactccgcccagttccgcccattctccgccccatggctgactaattttttttatttatgcagaggccgaggccgcctcggcctctgagctattccagaagtagtgaggaggcttttttggaggcctaggcttttgcaaaaacagtattcagtcgactggtaccaacaggctatggtgagcaagggcgaggagctgttcaccggcgtggtgcccatcctggtggagctggacggcgacgtgaacggccacaagttcagcgtgagcggcgagggcgagggcgacgccacctacggcaagctgaccctgaagttcatctgcaccaccggcaagctgcccgtgccctggcccaccctggtgaccaccctgacctacggcgtgcagtgcttcagccgctaccccgaccacatgaagcagcacgacttcttcaagagcgccatgcccgagggctacgtgcaggagcgcaccatcttcttcaaggacgacggcaactacaagacccgcgccgaggtgaagttcgagggcgacaccctggtgaaccgcatcgagctgaagggcatcgacttcaaggaggacggcaacatcctgggccacaagctggagtacaactacaacagccacaacgtgtacatcatggccgacaagcagaagaacggcatcaaggtgaacttcaagatccgccacaacatcgaggacggcagcgtgcagctggccgaccactaccagcagaacacccccatcggcgacggccccgtgctgctgcccgacaaccactacctgagcacccagagcgccctgagcaaggaccccaacgagaagcgcgaccacatggtgctgctggagttcgtgaccgccgccggcatcaccctgggcatggacgagctgtacaagtcaggtggatcctagataacctttaccttcattccctgtaaattggtaccctgcaaagctttcgttcgtatcatcggtttcgacaacgttcgtcaagttcaatgcatcagtttcattgcgcacacaccagaatcctactgagtttgagtattatggcattgggaaaactgtttttcttgtaccatttgttgtgcttgtaatttactgtgttttttattcggttttcgctatcgaactgtgaaatggaaatggatggagaagagttaatgaatgatatggtccttttgttcattctcaaattaatattatttgttttttctcttatttgttgtgtgttgaatttgaaattataagagatatgcaaacattttgttttgagtaaaaatgtgtcaaatcgtggcctctaatgaccgaagttaatatgaggagtaaaacacttgtagttgtaccattatgcttattcactaggcaacaaatatattttcagacctagaaaagctgcaaatgttactgaatacaagtatgtcctcttgtgttttagacatttatgaactttcctttatgtaattttccagaatccttgtcagattctaatcattgctttataattatagttatactcatggatttgtagttgagtatgaaaatattttttaatgcattttatgacttgccaattgattgacaacatgcatcaatcgactagtcgacgagtcagtaataaacggcgtcaaagtggttgcagccggcacacacgagtcgtgtttatcaactcaaagcacaaatacttttcctcaacctaaaaataaggcaattagccaaaaacaactttgcgtgtaaacaacgctcaatacacgtgtcattttattattagctattgcttcaccgccttagctttctcgtgacctagtcgtcctcgtcttttcttcttcttcttctataaaacaatacccaaagagctcttcttcttcacaattcagatttcaatttctcaaaatcttaaaaactttctctcaattctctctaccgtgatcaaggtaaatttctgtgttccttattctctcaaaatcttcgattttgttttcgttcgatcccaatttcgtatatgttctttggtttagattctgttaatcttagatcgaagacgattttctgggtttgatcgttagatatcatcttaattctcgattagggtttcatagatatcatccgatttgttcaaataatttgagttttgtcgaataattactcttcgatttgtgatttctatctagatctggtgttagtttctagtttgtgcgatcgaatttgtagattaatctgagtttttctgattaacaccacaccaatctggtaccagaaaaggggagaagcaaaaccatgggtaaaaagcctgaactcaccgcgacgtctgtcgagaagtttctgatcgaaaagttcgacagcgtctccgacctgatgcagctctcggagggcgaagaatctcgtgctttcagcttcgatgtaggagggcgtggatatgtcctgcgggtaaatagctgcgccgatggtttctacaaagatcgttatgtttatcggcactttgcatcggccgcgctcccgattccggaagtgcttgacattggggcattcagcgagagcctgacctattgcatctcccgccgtgcacagggtgtcacgttgcaagacctgcctgaaaccgaactgcccgctgttctgcaaccggtcgcggaggcgatggatgccatcgctgcggccgatcttagccagacgagcgggttcggcccattcggaccgcaaggaatcggtcaatacactacatggcgtgatttcatatgcgcgattgctgatccccatgtgtatcactggcaaactgtgatggacgacaccgtcagtgcgtccgtcgcgcaggctctcgatgagctgatgctttgggccgaggactgccccgaagtccggcacctcgtgcacgcggatttcggctccaacaatgtcctgacggacaatggccgcataacagcggtcattgactggagcgaggcgatgttcggggattcccaatacgaggtcgccaacatcttcttctggaggccgtggttggcttgtatggagcagcagacgcgctacttcgagcggaggcatccggagcttgcaggatcgccgcggctccgggcgtatatgctccgcattggtcttgaccaactctatcagagcttggttgacggcaatttcgatgatgcagcttgggcgcagggtcgatgcgacgcaatcgtccgatccggagccgggactgtcgggcgtacacaaatcgcccgcagaagcgcggccgtctggaccgatggctgtgtagaagtactcgccgatagtggaaaccgacgccccagcactcgtccgagggcaaaggaatagatgcatcctgctttaatgagatatgcgagacgcctatgatcgcatgatatttgctttcaattctgttgtgcacgttgtaaaaaacctgagcatgtgtagctcagatccttaccgccggtttcggttcattctaatgaatatatcacccgttactatcgtatttttatgaataatattctccgttcaatttactgattgtaccctactacttatatgtacaatattaaaatgaaaacaatatattgtgctgaataggtttatagcgacatctatgatagagcgccacaataacaaacaattgcgttttattattacaaatccaattttaaaaaaagcggcagaaccggtcaaacctaaaagactgattacataaatcttattcaaatttcaaaagtgccccaggggctagtatctacgacacaccgagcggcgaactaataacgctcactgaagggaactccggttccccgccggcgcgcatgggtgagattccttgaagttgagtattggccgtccgctctaccgaaagttacgggcaccattcaacccggtccagcacggcggccgggtaaccgacttgctgccccgagaattatgcagcatttttttggtgtatgtgggccccaaatgaagtgcaggtcaaaccttgacagtgacgacaaatcgttgggcgggtccagggcgaattttgcgacaacatgtcgaggctcagcaggaccggcatgcaagctagcttactagtgatattctatagtgtcacctaaat

SEQ ID NO: 295 - DNA, 6801 bp, synthetic construct
  source 1..6801: mol_type = other DNA; note = pAGS-0025 EF2 promoter
acctgtgatgcggttttggcagtacatcaatgggcgtggatagcggtttgactcacggggatttccaagtctccaccccattgacgtcaatgggagtttgttttggcaccaaaatcaacgggactttccaaaatgtcgtaacaactccgccccattgacgcaaatgggcggtaggcgtgtacggtgggaggtctatataagcagagctaacagtattcagtcgactggtaccaacaggctatggtgagcaagggcgaggagctgttcaccggggtggtgcccatcctggtcgagctggacggcgacgtaaacggccacaagttcagcgtgtccggcgagggcgagggcgatgccacctacggcaagctgaccctgaagttcatctgcaccaccggcaagctgcccgtgccctggcccaccctcgtgaccaccctgacctacggcgtgcagtgcttcagccgctaccccgaccacatgaagcagcacgacttcttcaagtccgccatgcccgaaggctacgtccaggagcgcaccatcttcttcaaggacgacggcaactacaagacccgcgccgaggtgaagttcgagggcgacaccctggtgaaccgcatcgagctgaagggcatcgacttcaaggaggacggcaacatcctggggcacaagctggagtacaactacaacagccacaacgtctatatcatggccgacaagcagaagaacggcatcaaggtgaacttcaagatccgccacaacatcgaggacggcagcgtgcagctcgccgaccactaccagcagaacacccccatcggcgacggccccgtgctgctgcccgacaaccactacctgagcacccagtccgccctgagcaaagaccccaacgagaagcgcgatcacatggtcctgctggagttcgtgaccgccgccgggatcactctcggcatggacgagctgtacaagtcaggtggatcctagataacctttaccttcattccctgtaaattggtaccctgcaaagctttcgttcgtatcatcggtttcgacaacgttcgtcaagttcaatgcatcagtttcattgcgcacacaccagaatcctactgagtttgagtattatggcattgggaaaactgtttttcttgtaccatttgttgtgcttgtaatttactgtgttttttattcggttttcgctatcgaactgtgaaatggaaatggatggagaagagttaatgaatgatatggtccttttgttcattctcaaattaatattatttgttttttctcttatttgttgtgtgttgaatttgaaattataagagatatgcaaacattttgttttgagtaaaaatgtgtcaaatcgtggcctctaatgaccgaagttaatatgaggagtaaaacacttgtagttgtaccattatgcttattcactaggcaacaaatatattttcagacctagaaaagctgcaaatgttactgaatacaagtatgtcctcttgtgttttagacatttatgaactttcctttatgtaattttccagaatccttgtcagattctaatcattgctttataattatagttatactcatggatttgtagttgagtatgaaaatattttttaatgcattttatgacttgccaattgattgacaacatgcatcaatcgactagtcgacgagtcagtaataaacggcgtcaaagtggttgcagccggcacacacgagtcgtgtttatcaactcaaagcacaaatacttttcctcaacctaaaaataaggcaattagccaaaaacaactttgcgtgtaaacaacgctcaatacacgtgtcattttattattagctattgcttcaccgccttagctttctcgtgacctagtcgtcctcgtcttttcttcttcttcttctataaaacaatacccaaagagctcttcttcttcacaattcagatttcaatttctcaaaatcttaaaaactttctctcaattctctctaccgtgatcaaggtaaatttctgtgttccttattctctcaaaatcttcgattttgttttcgttcgatcccaatttcgtatatgttctttggtttagattctgttaatcttagatcgaagacgattttctgggtttgatcgttagatatcatcttaattctcgattagggtttcatagatatcatccgatttgttcaaataatttgagttttgtcgaataattactcttcgatttgtgatttctatctagatctggtgttagtttctagtttgtgcgatcgaatttgtagattaatctgagtttttctgattaacaccacaccaatctggtaccagaaaaggggagaagcaaaaccatgggtaaaaagcctgaactcaccgcgacgtctgtcgagaagtttctgatcgaaaagttcgacagcgtctccgacctgatgcagctctcggagggcgaagaatctcgtgctttcagcttcgatgtaggagggcgtggatatgtcctgcgggtaaatagctgcgccgatggtttctacaaagatcgttatgtttatcggcactttgcatcggccgcgctcccgattccggaagtgcttgacattggggcattcagcgagagcctgacctattgcatctcccgccgtgcacagggtgtcacgttgcaagacctgcctgaaaccgaactgcccgctgttctgcaaccggtcgcggaggcgatggatgccatcgctgcggccgatcttagccagacgagcgggttcggcccattcggaccgcaaggaatcggtcaatacactacatggcgtgatttcatatgcgcgattgctgatccccatgtgtatcactggcaaactgtgatggacgacaccgtcagtgcgtccgtcgcgcaggctctcgatgagctgatgctttgggccgaggactgccccgaagtccggcacctcgtgcacgcggatttcggctccaacaatgtcctgacggacaatggccgcataacagcggtcattgactggagcgaggcgatgttcggggattcccaatacgaggtcgccaacatcttcttctggaggccgtggttggcttgtatggagcagcagacgcgctacttcgagcggaggcatccggagcttgcaggatcgccgcggctccgggcgtatatgctccgcattggtcttgaccaactctatcagagcttggttgacggcaatttcgatgatgcagcttgggcgcagggtcgatgcgacgcaatcgtccgatccggagccgggactgtcgggcgtacacaaatcgcccgcagaagcgcggccgtctggaccgatggctgtgtagaagtactcgccgatagtggaaaccgacgccccagcactcgtccgagggcaaaggaatagatgcatcctgctttaatgagatatgcgagacgcctatgatcgcatgatatttgctttcaattctgttgtgcacgttgtaaaaaacctgagcatgtgtagctcagatccttaccgccggtttcggttcattctaatgaatatatcacccgttactatcgtatttttatgaataatattctccgttcaatttactgattgtaccctactacttatatgtacaatattaaaatgaaaacaatatattgtgctgaataggtttatagcgacatctatgatagagcgccacaataacaaacaattgcgttttattattacaaatccaattttaaaaaaagcggcagaaccggtcaaacctaaaagactgattacataaatcttattcaaatttcaaaagtgccccaggggctagtatctacgacacaccgagcggcgaactaataacgctcactgaagggaactccggttccccgccggcgcgcatgggtgagattccttgaagttgagtattggccgtccgctctaccgaaagttacgggcaccattcaacccggtccagcacggcggccgggtaaccgacttgctgccccgagaattatgcagcatttttttggtgtatgtgggccccaaatgaagtgcaggtcaaaccttgacagtgacgacaaatcgttgggcgggtccagggcgaattttgcgacaacatgtcgaggctcagcaggaccggcatgcaagctagcttactagtgatattctatagtgtcacctaaatgtattctagaccaagcatgcacagctggcgttctcagccagatccaacgttacaccacaatatatcctgccaagatctaattccggggatcggaaatccagaagcccgagaggttgccgcctttcgggctttttctttttcaaaaaaaaaaatttataaaacgatctgttgcggccggccgccgggttgtgggcaaaggcgctcgacggtgggcaaccgcttgcggttgtccacgggcggagccggtgcgcgtagcgcattgtccacaagccaagggcgaccaataattgatatatatattcataattgaaaagctaattgaacatactacttgctgtaactacttgccggagcgaggggtgtttgcaagctgttgatctgaaagggctattagcgttctcacgtgcctttttgattagcgatttcacgtgaccttattagcgatttcacgtactccgattagcgatttcacgtaccctgattagcgatttcacgtggatagtttttggagcgggccggaaagccccgtgaatcaaggctttgcggggcattagcggtttcacgtggataactaccctctatccacaggcttccggggataaaaaagcccgctcgacggcgggctgttggatggggatcgcctgaatcgccccatcatccagccagaaagtgagggagccacggttgatgagagctttgttgtaggtggaccagttggtgattttgaacttttgctttgccacggaacggtctgcgttgtcgggaagatgcgtgatctgatccttcaactcagcaaaagttcgatttattcaacaaagccacgttgtgtctcaaaatctctgatgttacattgcacaagataaaaatatatcatcatgaacaataaaactgtctgcttacataaacagtaatacaaggggtgttatgagggaagcggtgatcgccgaagtatcgactcaactatcagaggtagttggcgtcatcgagcgccatctcgaaccgacgttgctggccgtacatttgtacggctccgcagtggatggcggcctgaagccacacagtgatattgatttgctggttacggtgaccgtaaggcttgatgaaacaacgcggcgagctttgatcaacgaccttttggaaacttcggcttcccctggagagagcgagattctccgcgctgtagaagtcaccattgttgtgcacgacgacatcattccgtggcgttatccagctaagcgcgaactgcaatttggagaatggcagcgcaatgacattcttgcaggtatcttcgagccagccacgatcgacattgatctggctatcttgctgacaaaagcaagagaacatagcgttgccttggtaggtccagcggcggaggaactctttgatccggttcctgaacaggatctatttgaggcgctaaatgaaaccttaacgctatggaactcgccgcccgactgggctggcgatgagcgaaatgtagtgcttacgttgtcccgcatttggtacagcgcagtaaccggcaaaatcgcgccgaaggatgtcgctgccgactgggcaatggagcgcctgccggcccagtatcagcccgtcatacttgaagctaggcaggcttatcttggacaagaagatcgcttggcctcgcgcgcagatcagttggaagaatttgttcactacgtgaaaggcgagatcaccaaggtagtcggcaaataatcactagaccaatgttacacatatatactttagattgatttaaaacttcatttttaatttaaaaggatctaggtgaagatcctttttgataatctcatgaccaaaatcccttaacgtgagttttcgttccactgagcgtcagaccccgtagaaaagatcaaaggatcttcttgagatcctttttttctgcgcgtaatctgctgcttgcaaacaaaaaaaccaccgctaccagcggtggtttgtttgccggatcaagagctaccaactcttcttccgaaggtaactggcttcagcagagcgcagataccaaatactgttcttctagtgtagccgtagttaggccaccacttcaagaactctgtagcaccgcctacatacctcgctctgctaatcctgttaccagtggctgctgccagtggcgataagtcgtgtcttaccgggttggactcaagacgatagttaccggataaggcgcagcggtcgggctgaacggggggttcgtgcacacagcccagcttggagcgaacgacctacaccgaactgagatacctacagcgtgagctatgagaaagcgccacgcttcccgaagggagaaaggcggacaggtatccggtaagcggcagggtcggaacaggagagcgcacgagggagcttccagggggaaacgcctggtatctttatagtcctgtcgggtttcgccacctctgacttgagcgtcgatttttgtgatgctcgtcaggggggcggagcctatggaaaaacgccagcaacgcggcctttttacggttcctggccttttgctggccttttgctcacatgagatctcaaacaaacacatacagcgacttagtttacccgccaatatatcctgtcaaggctcgaactaggctcggacgaagtaagcggccgcaaccttaattaaacacggcgcgccaacagcgatcgcaccaggtacc

SEQ ID NO: 296 - DNA, 7105 bp, synthetic construct
  source 1..7105: mol_type = other DNA; note = pAGS-0026 Histone 4 promoter
acctcgttacataacttacggtaaatggcccgcctggctgaccgcccaacgacccccgcccattgacgtcaataatgacgtatgttcccatagtaacgccaatagggactttccattgacgtcaatgggtggagtatttacggtaaactgcccacttggcagtacatcaagtgtatcatatgccaagtacgccccctattgacgtcaatgacggtaaatggcccgcctggcattatgcccagtacatgaccttatgggactttcctacttggcagtacatctacgtattagtcatcgctattaccatggtgatgcggttttggcagtacatcaatgggcgtggatagcggtttgactcacggggatttccaagtctccaccccattgacgtcaatgggagtttgttttggcaccaaaatcaacgggactttccaaaatgtcgtaacaactccgccccattgacgcaaatgggcggtaggcgtgtacggtgggaggtctatataagcagagctaacagtattcagtcgactggtaccaacaggctatggtgagcaagggcgaggagctgttcaccggggtggtgcccatcctggtcgagctggacggcgacgtaaacggccacaagttcagcgtgtccggcgagggcgagggcgatgccacctacggcaagctgaccctgaagttcatctgcaccaccggcaagctgcccgtgccctggcccaccctcgtgaccaccctgacctacggcgtgcagtgcttcagccgctaccccgaccacatgaagcagcacgacttcttcaagtccgccatgcccgaaggctacgtccaggagcgcaccatcttcttcaaggacgacggcaactacaagacccgcgccgaggtgaagttcgagggcgacaccctggtgaaccgcatcgagctgaagggcatcgacttcaaggaggacggcaacatcctggggcacaagctggagtacaactacaacagccacaacgtctatatcatggccgacaagcagaagaacggcatcaaggtgaacttcaagatccgccacaacatcgaggacggcagcgtgcagctcgccgaccactaccagcagaacacccccatcggcgacggccccgtgctgctgcccgacaaccactacctgagcacccagtccgccctgagcaaagaccccaacgagaagcgcgatcacatggtcctgctggagttcgtgaccgccgccgggatcactctcggcatggacgagctgtacaagtcaggtggatcctagataacctttaccttcattccctgtaaattggtaccctgcaaagctttcgttcgtatcatcggtttcgacaacgttcgtcaagttcaatgcatcagtttcattgcgcacacaccagaatcctactgagtttgagtattatggcattgggaaaactgtttttcttgtaccatttgttgtgcttgtaatttactgtgttttttattcggttttcgctatcgaactgtgaaatggaaatggatggagaagagttaatgaatgatatggtccttttgttcattctcaaattaatattatttgttttttctcttatttgttgtgtgttgaatttgaaattataagagatatgcaaacattttgttttgagtaaaaatgtgtcaaatcgtggcctctaatgaccgaagttaatatgaggagtaaaacacttgtagttgtaccattatgcttattcactaggcaacaaatatattttcagacctagaaaagctgcaaatgttactgaatacaagtatgtcctcttgtgttttagacatttatgaactttcctttatgtaattttccagaatccttgtcagattctaatcattgctttataattatagttatactcatggatttgtagttgagtatgaaaatattttttaatgcattttatgacttgccaattgattgacaacatgcatcaatcgactagtcgacgagtcagtaataaacggcgtcaaagtggttgcagccggcacacacgagtcgtgtttatcaactcaaagcacaaatacttttcctcaacctaaaaataaggcaattagccaaaaacaactttgcgtgtaaacaacgctcaatacacgtgtcattttattattagctattgcttcaccgccttagctttctcgtgacctagtcgtcctcgtcttttcttcttcttcttctataaaacaatacccaaagagctcttcttcttcacaattcagatttcaatttctcaaaatcttaaaaactttctctcaattctctctaccgtgatcaaggtaaatttctgtgttccttattctctcaaaatcttcgattttgttttcgttcgatcccaatttcgtatatgttctttggtttagattctgttaatcttagatcgaagacgattttctgggtttgatcgttagatatcatcttaattctcgattagggtttcatagatatcatccgatttgttcaaataatttgagttttgtcgaataattactcttcgatttgtgatttctatctagatctggtgttagtttctagtttgtgcgatcgaatttgtagattaatctgagtttttctgattaacaccacaccaatctggtaccagaaaaggggagaagcaaaaccatgggtaaaaagcctgaactcaccgcgacgtctgtcgagaagtttctgatcgaaaagttcgacagcgtctccgacctgatgcagctctcggagggcgaagaatctcgtgctttcagcttcgatgtaggagggcgtggatatgtcctgcgggtaaatagctgcgccgatggtttctacaaagatcgttatgtttatcggcactttgcatcggccgcgctcccgattccggaagtgcttgacattggggcattcagcgagagcctgacctattgcatctcccgccgtgcacagggtgtcacgttgcaagacctgcctgaaaccgaactgcccgctgttctgcaaccggtcgcggaggcgatggatgccatcgctgcggccgatcttagccagacgagcgggttcggcccattcggaccgcaaggaatcggtcaatacactacatggcgtgatttcatatgcgcgattgctgatccccatgtgtatcactggcaaactgtgatggacgacaccgtcagtgcgtccgtcgcgcaggctctcgatgagctgatgctttgggccgaggactgccccgaagtccggcacctcgtgcacgcggatttcggctccaacaatgtcctgacggacaatggccgcataacagcggtcattgactggagcgaggcgatgttcggggattcccaatacgaggtcgccaacatcttcttctggaggccgtggttggcttgtatggagcagcagacgcgctacttcgagcggaggcatccggagcttgcaggatcgccgcggctccgggcgtatatgctccgcattggtcttgaccaactctatcagagcttggttgacggcaatttcgatgatgcagcttgggcgcagggtcgatgcgacgcaatcgtccgatccggagccgggactgtcgggcgtacacaaatcgcccgcagaagcgcggccgtctggaccgatggctgtgtagaagtactcgccgatagtggaaaccgacgccccagcactcgtccgagggcaaaggaatagatgcatcctgctttaatgagatatgcgagacgcctatgatcgcatgatatttgctttcaattctgttgtgcacgttgtaaaaaacctgagcatgtgtagctcagatccttaccgccggtttcggttcattctaatgaatatatcacccgttactatcgtatttttatgaataatattctccgttcaatttactgattgtaccctactacttatatgtacaatattaaaatgaaaacaatatattgtgctgaataggtttatagcgacatctatgatagagcgccacaataacaaacaattgcgttttattattacaaatccaattttaaaaaaagcggcagaaccggtcaaacctaaaagactgattacataaatcttattcaaatttcaaaagtgccccaggggctagtatctacgacacaccgagcggcgaactaataacgctcactgaagggaactccggttccccgccggcgcgcatgggtgagattccttgaagttgagtattggccgtccgctctaccgaaagttacgggcaccattcaacccggtccagcacggcggccgggtaaccgacttgctgccccgagaattatgcagcatttttttggtgtatgtgggccccaaatgaagtgcaggtcaaaccttgacagtgacgacaaatcgttgggcgggtccagggcgaattttgcgacaacatgtcgaggctcagcaggaccggcatgcaagctagcttactagtgatattctatagtgtcacctaaatgtattctagaccaagcatgcacagctggcgttctcagccagatccaacgttacaccacaatatatcctgccaagatctaattccggggatcggaaatccagaagcccgagaggttgccgcctttcgggctttttctttttcaaaaaaaaaaatttataaaacgatctgttgcggccggccgccgggttgtgggcaaaggcgctcgacggtgggcaaccgcttgcggttgtccacgggcggagccggtgcgcgtagcgcattgtccacaagccaagggcgaccaataattgatatatatattcataattgaaaagctaattgaacatactacttgctgtaactacttgccggagcgaggggtgtttgcaagctgttgatctgaaagggctattagcgttctcacgtgcctttttgattagcgatttcacgtgaccttattagcgatttcacgtactccgattagcgatttcacgtaccctgattagcgatttcacgtggatagtttttggagcgggccggaaagccccgtgaatcaaggctttgcggggcattagcggtttcacgtggataactaccctctatccacaggcttccggggataaaaaagcccgctcgacggcgggctgttggatggggatcgcctgaatcgccccatcatccagccagaaagtgagggagccacggttgatgagagctttgttgtaggtggaccagttggtgattttgaacttttgctttgccacggaacggtctgcgttgtcgggaagatgcgtgatctgatccttcaactcagcaaaagttcgatttattcaacaaagccacgttgtgtctcaaaatctctgatgttacattgcacaagataaaaatatatcatcatgaacaataaaactgtctgcttacataaacagtaatacaaggggtgttatgagggaagcggtgatcgccgaagtatcgactcaactatcagaggtagttggcgtcatcgagcgccatctcgaaccgacgttgctggccgtacatttgtacggctccgcagtggatggcggcctgaagccacacagtgatattgatttgctggttacggtgaccgtaaggcttgatgaaacaacgcggcgagctttgatcaacgaccttttggaaacttcggcttcccctggagagagcgagattctccgcgctgtagaagtcaccattgttgtgcacgacgacatcattccgtggcgttatccagctaagcgcgaactgcaatttggagaatggcagcgcaatgacattcttgcaggtatcttcgagccagccacgatcgacattgatctggctatcttgctgacaaaagcaagagaacatagcgttgccttggtaggtccagcggcggaggaactctttgatccggttcctgaacaggatctatttgaggcgctaaatgaaaccttaacgctatggaactcgccgcccgactgggctggcgatgagcgaaatgtagtgcttacgttgtcccgcatttggtacagcgcagtaaccggcaaaatcgcgccgaaggatgtcgctgccgactgggcaatggagcgcctgccggcccagtatcagcccgtcatacttgaagctaggcaggcttatcttggacaagaagatcgcttggcctcgcgcgcagatcagttggaagaatttgttcactacgtgaaaggcgagatcaccaaggtagtcggcaaataatcactagaccaatgttacacatatatactttagattgatttaaaacttcatttttaatttaaaaggatctaggtgaagatcctttttgataatctcatgaccaaaatcccttaacgtgagttttcgttccactgagcgtcagaccccgtagaaaagatcaaaggatcttcttgagatcctttttttctgcgcgtaatctgctgcttgcaaacaaaaaaaccaccgctaccagcggtggtttgtttgccggatcaagagctaccaactcttcttccgaaggtaactggcttcagcagagcgcagataccaaatactgttcttctagtgtagccgtagttaggccaccacttcaagaactctgtagcaccgcctacatacctcgctctgctaatcctgttaccagtggctgctgccagtggcgataagtcgtgtcttaccgggttggactcaagacgatagttaccggataaggcgcagcggtcgggctgaacggggggttcgtgcacacagcccagcttggagcgaacgacctacaccgaactgagatacctacagcgtgagctatgagaaagcgccacgcttcccgaagggagaaaggcggacaggtatccggtaagcggcagggtcggaacaggagagcgcacgagggagcttccagggggaaacgcctggtatctttatagtcctgtcgggtttcgccacctctgacttgagcgtcgatttttgtgatgctcgtcaggggggcggagcctatggaaaaacgccagcaacgcggcctttttacggttcctggccttttgctggccttttgctcacatgagatctcaaacaaacacatacagcgacttagtttacccgccaatatatcctgtcaaggctcgaactaggctcggacgaagtaagcggccgcaaccttaattaaacacggcgcgccaacagcgatcgcaccaggtacc

SEQ ID NO: 297 - DNA, 6955 bp, synthetic construct
  source 1..6955: mol_type = other DNA; note = pAGS-0027 Lhcf.1 promoter
acctctgaggcggaaagaaccagctgtggaatgtgtgtcagttagggtgtggaaagtccccaggctccccagcaggcagaagtatgcaaagcatgcatctcaattagtcagcaaccaggtgtggaaagtccccaggctccccagcaggcagaagtatgcaaagcatgcatctcaattagtcagcaaccatagtcccgcccctaactccgcccatcccgcccctaactccgcccagttccgcccattctccgccccatggctgactaattttttttatttatgcagaggccgaggccgcctcggcctctgagctattccagaagtagtgaggaggcttttttggaggcctaggcttttgcaaaaacagtattcagtcgactggtaccaacaggctatggtgagcaagggcgaggagctgttcaccggggtggtgcccatcctggtcgagctggacggcgacgtaaacggccacaagttcagcgtgtccggcgagggcgagggcgatgccacctacggcaagctgaccctgaagttcatctgcaccaccggcaagctgcccgtgccctggcccaccctcgtgaccaccctgacctacggcgtgcagtgcttcagccgctaccccgaccacatgaagcagcacgacttcttcaagtccgccatgcccgaaggctacgtccaggagcgcaccatcttcttcaaggacgacggcaactacaagacccgcgccgaggtgaagttcgagggcgacaccctggtgaaccgcatcgagctgaagggcatcgacttcaaggaggacggcaacatcctggggcacaagctggagtacaactacaacagccacaacgtctatatcatggccgacaagcagaagaacggcatcaaggtgaacttcaagatccgccacaacatcgaggacggcagcgtgcagctcgccgaccactaccagcagaacacccccatcggcgacggccccgtgctgctgcccgacaaccactacctgagcacccagtccgccctgagcaaagaccccaacgagaagcgcgatcacatggtcctgctggagttcgtgaccgccgccgggatcactctcggcatggacgagctgtacaagtcaggtggatcctagataacctttaccttcattccctgtaaattggtaccctgcaaagctttcgttcgtatcatcggtttcgacaacgttcgtcaagttcaatgcatcagtttcattgcgcacacaccagaatcctactgagtttgagtattatggcattgggaaaactgtttttcttgtaccatttgttgtgcttgtaatttactgtgttttttattcggttttcgctatcgaactgtgaaatggaaatggatggagaagagttaatgaatgatatggtccttttgttcattctcaaattaatattatttgttttttctcttatttgttgtgtgttgaatttgaaattataagagatatgcaaacattttgttttgagtaaaaatgtgtcaaatcgtggcctctaatgaccgaagttaatatgaggagtaaaacacttgtagttgtaccattatgcttattcactaggcaacaaatatattttcagacctagaaaagctgcaaatgttactgaatacaagtatgtcctcttgtgttttagacatttatgaactttcctttatgtaattttccagaatccttgtcagattctaatcattgctttataattatagttatactcatggatttgtagttgagtatgaaaatattttttaatgcattttatgacttgccaattgattgacaacatgcatcaatcgactagtcgacgagtcagtaataaacggcgtcaaagtggttgcagccggcacacacgagtcgtgtttatcaactcaaagcacaaatacttttcctcaacctaaaaataaggcaattagccaaaaacaactttgcgtgtaaacaacgctcaatacacgtgtcattttattattagctattgcttcaccgccttagctttctcgtgacctagtcgtcctcgtcttttcttcttcttcttctataaaacaatacccaaagagctcttcttcttcacaattcagatttcaatttctcaaaatcttaaaaactttctctcaattctctctaccgtgatcaaggtaaatttctgtgttccttattctctcaaaatcttcgattttgttttcgttcgatcccaatttcgtatatgttctttggtttagattctgttaatcttagatcgaagacgattttctgggtttgatcgttagatatcatcttaattctcgattagggtttcatagatatcatccgatttgttcaaataatttgagttttgtcgaataattactcttcgatttgtgatttctatctagatctggtgttagtttctagtttgtgcgatcgaatttgtagattaatctgagtttttctgattaacaccacaccaatctggtaccagaaaaggggagaagcaaaaccatgggtaaaaagcctgaactcaccgcgacgtctgtcgagaagtttctgatcgaaaagttcgacagcgtctccgacctgatgcagctctcggagggcgaagaatctcgtgctttcagcttcgatgtaggagggcgtggatatgtcctgcgggtaaatagctgcgccgatggtttctacaaagatcgttatgtttatcggcactttgcatcggccgcgctcccgattccggaagtgcttgacattggggcattcagcgagagcctgacctattgcatctcccgccgtgcacagggtgtcacgttgcaagacctgcctgaaaccgaactgcccgctgttctgcaaccggtcgcggaggcgatggatgccatcgctgcggccgatcttagccagacgagcgggttcggcccattcggaccgcaaggaatcggtcaatacactacatggcgtgatttcatatgcgcgattgctgatccccatgtgtatcactggcaaactgtgatggacgacaccgtcagtgcgtccgtcgcgcaggctctcgatgagctgatgctttgggccgaggactgccccgaagtccggcacctcgtgcacgcggatttcggctccaacaatgtcctgacggacaatggccgcataacagcggtcattgactggagcgaggcgatgttcggggattcccaatacgaggtcgccaacatcttcttctggaggccgtggttggcttgtatggagcagcagacgcgctacttcgagcggaggcatccggagcttgcaggatcgccgcggctccgggcgtatatgctccgcattggtcttgaccaactctatcagagcttggttgacggcaatttcgatgatgcagcttgggcgcagggtcgatgcgacgcaatcgtccgatccggagccgggactgtcgggcgtacacaaatcgcccgcagaagcgcggccgtctggaccgatggctgtgtagaagtactcgccgatagtggaaaccgacgccccagcactcgtccgagggcaaaggaatagatgcatcctgctttaatgagatatgcgagacgcctatgatcgcatgatatttgctttcaattctgttgtgcacgttgtaaaaaacctgagcatgtgtagctcagatccttaccgccggtttcggttcattctaatgaatatatcacccgttactatcgtatttttatgaataatattctccgttcaatttactgattgtaccctactacttatatgtacaatattaaaatgaaaacaatatattgtgctgaataggtttatagcgacatctatgatagagcgccacaataacaaacaattgcgttttattattacaaatccaattttaaaaaaagcggcagaaccggtcaaacctaaaagactgattacataaatcttattcaaatttcaaaagtgccccaggggctagtatctacgacacaccgagcggcgaactaataacgctcactgaagggaactccggttccccgccggcgcgcatgggtgagattccttgaagttgagtattggccgtccgctctaccgaaagttacgggcaccattcaacccggtccagcacggcggccgggtaaccgacttgctgccccgagaattatgcagcatttttttggtgtatgtgggccccaaatgaagtgcaggtcaaaccttgacagtgacgacaaatcgttgggcgggtccagggcgaattttgcgacaacatgtcgaggctcagcaggaccggcatgcaagctagcttactagtgatattctatagtgtcacctaaatgtattctagaccaagcatgcacagctggcgttctcagccagatccaacgttacaccacaatatatcctgccaagatctaattccggggatcggaaatccagaagcccgagaggttgccgcctttcgggctttttctttttcaaaaaaaaaaatttataaaacgatctgttgcggccggccgccgggttgtgggcaaaggcgctcgacggtgggcaaccgcttgcggttgtccacgggcggagccggtgcgcgtagcgcattgtccacaagccaagggcgaccaataattgatatatatattcataattgaaaagctaattgaacatactacttgctgtaactacttgccggagcgaggggtgtttgcaagctgttgatctgaaagggctattagcgttctcacgtgcctttttgattagcgatttcacgtgaccttattagcgatttcacgtactccgattagcgatttcacgtaccctgattagcgatttcacgtggatagtttttggagcgggccggaaagccccgtgaatcaaggctttgcggggcattagcggtttcacgtggataactaccctctatccacaggcttccggggataaaaaagcccgctcgacggcgggctgttggatggggatcgcctgaatcgccccatcatccagccagaaagtgagggagccacggttgatgagagctttgttgtaggtggaccagttggtgattttgaacttttgctttgccacggaacggtctgcgttgtcgggaagatgcgtgatctgatccttcaactcagcaaaagttcgatttattcaacaaagccacgttgtgtctcaaaatctctgatgttacattgcacaagataaaaatatatcatcatgaacaataaaactgtctgcttacataaacagtaatacaaggggtgttatgagggaagcggtgatcgccgaagtatcgactcaactatcagaggtagttggcgtcatcgagcgccatctcgaaccgacgttgctggccgtacatttgtacggctccgcagtggatggcggcctgaagccacacagtgatattgatttgctggttacggtgaccgtaaggcttgatgaaacaacgcggcgagctttgatcaacgaccttttggaaacttcggcttcccctggagagagcgagattctccgcgctgtagaagtcaccattgttgtgcacgacgacatcattccgtggcgttatccagctaagcgcgaactgcaatttggagaatggcagcgcaatgacattcttgcaggtatcttcgagccagccacgatcgacattgatctggctatcttgctgacaaaagcaagagaacatagcgttgccttggtaggtccagcggcggaggaactctttgatccggttcctgaacaggatctatttgaggcgctaaatgaaaccttaacgctatggaactcgccgcccgactgggctggcgatgagcgaaatgtagtgcttacgttgtcccgcatttggtacagcgcagtaaccggcaaaatcgcgccgaaggatgtcgctgccgactgggcaatggagcgcctgccggcccagtatcagcccgtcatacttgaagctaggcaggcttatcttggacaagaagatcgcttggcctcgcgcgcagatcagttggaagaatttgttcactacgtgaaaggcgagatcaccaaggtagtcggcaaataatcactagaccaatgttacacatatatactttagattgatttaaaacttcatttttaatttaaaaggatctaggtgaagatcctttttgataatctcatgaccaaaatcccttaacgtgagttttcgttccactgagcgtcagaccccgtagaaaagatcaaaggatcttcttgagatcctttttttctgcgcgtaatctgctgcttgcaaacaaaaaaaccaccgctaccagcggtggtttgtttgccggatcaagagctaccaactcttcttccgaaggtaactggcttcagcagagcgcagataccaaatactgttcttctagtgtagccgtagttaggccaccacttcaagaactctgtagcaccgcctacatacctcgctctgctaatcctgttaccagtggctgctgccagtggcgataagtcgtgtcttaccgggttggactcaagacgatagttaccggataaggcgcagcggtcgggctgaacggggggttcgtgcacacagcccagcttggagcgaacgacctacaccgaactgagatacctacagcgtgagctatgagaaagcgccacgcttcccgaagggagaaaggcggacaggtatccggtaagcggcagggtcggaacaggagagcgcacgagggagcttccagggggaaacgcctggtatctttatagtcctgtcgggtttcgccacctctgacttgagcgtcgatttttgtgatgctcgtcaggggggcggagcctatggaaaaacgccagcaacgcggcctttttacggttcctggccttttgctggccttttgctcacatgagatctcaaacaaacacatacagcgacttagtttacccgccaatatatcctgtcaaggctcgaactaggctcggacgaagtaagcggccgcaaccttaattaaacacggcgcgccaacagcgatcgcaccaggtacc

SEQ ID NO: 298 - DNA, 7061 bp, synthetic construct
  source 1..7061: mol_type = other DNA; note = pAGS-0028 Ubi.U4 promoter
acctcgcggaacccctatttgtttatttttctaaatacattcaaatatgtatccgctcatgagacaataaccctgataaatgcttcaataatattgaaaaaggaagagtcctgaggcggaaagaaccagctgtggaatgtgtgtcagttagggtgtggaaagtccccaggctccccagcaggcagaagtatgcaaagcatgcatctcaattagtcagcaaccaggtgtggaaagtccccaggctccccagcaggcagaagtatgcaaagcatgcatctcaattagtcagcaaccatagtcccgcccctaactccgcccatcccgcccctaactccgcccagttccgcccattctccgccccatggctgactaattttttttatttatgcagaggccgaggccgcctcggcctctgagctattccagaagtagtgaggaggcttttttggaggcctaggcttttgcaaaaacagtattcagtcgactggtaccaacaggctatggtgagcaagggcgaggagctgttcaccggggtggtgcccatcctggtcgagctggacggcgacgtaaacggccacaagttcagcgtgtccggcgagggcgagggcgatgccacctacggcaagctgaccctgaagttcatctgcaccaccggcaagctgcccgtgccctggcccaccctcgtgaccaccctgacctacggcgtgcagtgcttcagccgctaccccgaccacatgaagcagcacgacttcttcaagtccgccatgcccgaaggctacgtccaggagcgcaccatcttcttcaaggacgacggcaactacaagacccgcgccgaggtgaagttcgagggcgacaccctggtgaaccgcatcgagctgaagggcatcgacttcaaggaggacggcaacatcctggggcacaagctggagtacaactacaacagccacaacgtctatatcatggccgacaagcagaagaacggcatcaaggtgaacttcaagatccgccacaacatcgaggacggcagcgtgcagctcgccgaccactaccagcagaacacccccatcggcgacggccccgtgctgctgcccgacaaccactacctgagcacccagtccgccctgagcaaagaccccaacgagaagcgcgatcacatggtcctgctggagttcgtgaccgccgccgggatcactctcggcatggacgagctgtacaagtcaggtggatcctagataacctttaccttcattccctgtaaattggtaccctgcaaagctttcgttcgtatcatcggtttcgacaacgttcgtcaagttcaatgcatcagtttcattgcgcacacaccagaatcctactgagtttgagtattatggcattgggaaaactgtttttcttgtaccatttgttgtgcttgtaatttactgtgttttttattcggttttcgctatcgaactgtgaaatggaaatggatggagaagagttaatgaatgatatggtccttttgttcattctcaaattaatattatttgttttttctcttatttgttgtgtgttgaatttgaaattataagagatatgcaaacattttgttttgagtaaaaatgtgtcaaatcgtggcctctaatgaccgaagttaatatgaggagtaaaacacttgtagttgtaccattatgcttattcactaggcaacaaatatattttcagacctagaaaagctgcaaatgttactgaatacaagtatgtcctcttgtgttttagacatttatgaactttcctttatgtaattttccagaatccttgtcagattctaatcattgctttataattatagttatactcatggatttgtagttgagtatgaaaatattttttaatgcattttatgacttgccaattgattgacaacatgcatcaatcgactagtcgacgagtcagtaataaacggcgtcaaagtggttgcagccggcacacacgagtcgtgtttatcaactcaaagcacaaatacttttcctcaacctaaaaataaggcaattagccaaaaacaactttgcgtgtaaacaacgctcaatacacgtgtcattttattattagctattgcttcaccgccttagctttctcgtgacctagtcgtcctcgtcttttcttcttcttcttctataaaacaatacccaaagagctcttcttcttcacaattcagatttcaatttctcaaaatcttaaaaactttctctcaattctctctaccgtgatcaaggtaaatttctgtgttccttattctctcaaaatcttcgattttgttttcgttcgatcccaatttcgtatatgttctttggtttagattctgttaatcttagatcgaagacgattttctgggtttgatcgttagatatcatcttaattctcgattagggtttcatagatatcatccgatttgttcaaataatttgagttttgtcgaataattactcttcgatttgtgatttctatctagatctggtgttagtttctagtttgtgcgatcgaatttgtagattaatctgagtttttctgattaacaccacaccaatctggtaccagaaaaggggagaagcaaaaccatgggtaaaaagcctgaactcaccgcgacgtctgtcgagaagtttctgatcgaaaagttcgacagcgtctccgacctgatgcagctctcggagggcgaagaatctcgtgctttcagcttcgatgtaggagggcgtggatatgtcctgcgggtaaatagctgcgccgatggtttctacaaagatcgttatgtttatcggcactttgcatcggccgcgctcccgattccggaagtgcttgacattggggcattcagcgagagcctgacctattgcatctcccgccgtgcacagggtgtcacgttgcaagacctgcctgaaaccgaactgcccgctgttctgcaaccggtcgcggaggcgatggatgccatcgctgcggccgatcttagccagacgagcgggttcggcccattcggaccgcaaggaatcggtcaatacactacatggcgtgatttcatatgcgcgattgctgatccccatgtgtatcactggcaaactgtgatggacgacaccgtcagtgcgtccgtcgcgcaggctctcgatgagctgatgctttgggccgaggactgccccgaagtccggcacctcgtgcacgcggatttcggctccaacaatgtcctgacggacaatggccgcataacagcggtcattgactggagcgaggcgatgttcggggattcccaatacgaggtcgccaacatcttcttctggaggccgtggttggcttgtatggagcagcagacgcgctacttcgagcggaggcatccggagcttgcaggatcgccgcggctccgggcgtatatgctccgcattggtcttgaccaactctatcagagcttggttgacggcaatttcgatgatgcagcttgggcgcagggtcgatgcgacgcaatcgtccgatccggagccgggactgtcgggcgtacacaaatcgcccgcagaagcgcggccgtctggaccgatggctgtgtagaagtactcgccgatagtggaaaccgacgccccagcactcgtccgagggcaaaggaatagatgcatcctgctttaatgagatatgcgagacgcctatgatcgcatgatatttgctttcaattctgttgtgcacgttgtaaaaaacctgagcatgtgtagctcagatccttaccgccggtttcggttcattctaatgaatatatcacccgttactatcgtatttttatgaataatattctccgttcaatttactgattgtaccctactacttatatgtacaatattaaaatgaaaacaatatattgtgctgaataggtttatagcgacatctatgatagagcgccacaataacaaacaattgcgttttattattacaaatccaattttaaaaaaagcggcagaaccggtcaaacctaaaagactgattacataaatcttattcaaatttcaaaagtgccccaggggctagtatctacgacacaccgagcggcgaactaataacgctcactgaagggaactccggttccccgccggcgcgcatgggtgagattccttgaagttgagtattggccgtccgctctaccgaaagttacgggcaccattcaacccggtccagcacggcggccgggtaaccgacttgctgccccgagaattatgcagcatttttttggtgtatgtgggccccaaatgaagtgcaggtcaaaccttgacagtgacgacaaatcgttgggcgggtccagggcgaattttgcgacaacatgtcgaggctcagcaggaccggcatgcaagctagcttactagtgatattctatagtgtcacctaaatgtattctagaccaagcatgcacagctggcgttctcagccagatccaacgttacaccacaatatatcctgccaagatctaattccggggatcggaaatccagaagcccgagaggttgccgcctttcgggctttttctttttcaaaaaaaaaaatttataaaacgatctgttgcggccggccgccgggttgtgggcaaaggcgctcgacggtgggcaaccgcttgcggttgtccacgggcggagccggtgcgcgtagcgcattgtccacaagccaagggcgaccaataattgatatatatattcataattgaaaagctaattgaacatactacttgctgtaactacttgccggagcgaggggtgtttgcaagctgttgatctgaaagggctattagcgttctcacgtgcctttttgattagcgatttcacgtgaccttattagcgatttcacgtactccgattagcgatttcacgtaccctgattagcgatttcacgtggatagtttttggagcgggccggaaagccccgtgaatcaaggctttgcggggcattagcggtttcacgtggataactaccctctatccacaggcttccggggataaaaaagcccgctcgacggcgggctgttggatggggatcgcctgaatcgccccatcatccagccagaaagtgagggagccacggttgatgagagctttgttgtaggtggaccagttggtgattttgaacttttgctttgccacggaacggtctgcgttgtcgggaagatgcgtgatctgatccttcaactcagcaaaagttcgatttattcaacaaagccacgttgtgtctcaaaatctctgatgttacattgcacaagataaaaatatatcatcatgaacaataaaactgtctgcttacataaacagtaatacaaggggtgttatgagggaagcggtgatcgccgaagtatcgactcaactatcagaggtagttggcgtcatcgagcgccatctcgaaccgacgttgctggccgtacatttgtacggctccgcagtggatggcggcctgaagccacacagtgatattgatttgctggttacggtgaccgtaaggcttgatgaaacaacgcggcgagctttgatcaacgaccttttggaaacttcggcttcccctggagagagcgagattctccgcgctgtagaagtcaccattgttgtgcacgacgacatcattccgtggcgttatccagctaagcgcgaactgcaatttggagaatggcagcgcaatgacattcttgcaggtatcttcgagccagccacgatcgacattgatctggctatcttgctgacaaaagcaagagaacatagcgttgccttggtaggtccagcggcggaggaactctttgatccggttcctgaacaggatctatttgaggcgctaaatgaaaccttaacgctatggaactcgccgcccgactgggctggcgatgagcgaaatgtagtgcttacgttgtcccgcatttggtacagcgcagtaaccggcaaaatcgcgccgaaggatgtcgctgccgactgggcaatggagcgcctgccggcccagtatcagcccgtcatacttgaagctaggcaggcttatcttggacaagaagatcgcttggcctcgcgcgcagatcagttggaagaatttgttcactacgtgaaaggcgagatcaccaaggtagtcggcaaataatcactagaccaatgttacacatatatactttagattgatttaaaacttcatttttaatttaaaaggatctaggtgaagatcctttttgataatctcatgaccaaaatcccttaacgtgagttttcgttccactgagcgtcagaccccgtagaaaagatcaaaggatcttcttgagatcctttttttctgcgcgtaatctgctgcttgcaaacaaaaaaaccaccgctaccagcggtggtttgtttgccggatcaagagctaccaactcttcttccgaaggtaactggcttcagcagagcgcagataccaaatactgttcttctagtgtagccgtagttaggccaccacttcaagaactctgtagcaccgcctacatacctcgctctgctaatcctgttaccagtggctgctgccagtggcgataagtcgtgtcttaccgggttggactcaagacgatagttaccggataaggcgcagcggtcgggctgaacggggggttcgtgcacacagcccagcttggagcgaacgacctacaccgaactgagatacctacagcgtgagctatgagaaagcgccacgcttcccgaagggagaaaggcggacaggtatccggtaagcggcagggtcggaacaggagagcgcacgagggagcttccagggggaaacgcctggtatctttatagtcctgtcgggtttcgccacctctgacttgagcgtcgatttttgtgatgctcgtcaggggggcggagcctatggaaaaacgccagcaacgcggcctttttacggttcctggccttttgctggccttttgctcacatgagatctcaaacaaacacatacagcgacttagtttacccgccaatatatcctgtcaaggctcgaactaggctcggacgaagtaagcggccgcaaccttaattaaacacggcgcgccaacagcgatcgcaccaggtacc

SEQ ID NO: 299 - DNA, 6921 bp, synthetic construct
  source 1..6921: mol_type = other DNA; note = pAGS-0029 CAM 35S promoter
accttccattttgacatgtttcctagctagaaggaacagctattcatatgaattttccgaggtcacgctgtgatggatcgattcgttcccgtcacagacgcaagcagcgaggtgatggctggacgggcacgcgtcacaatttagaacaacccggactcttgtgacgcgagctccgggtgcggaaaaccctacggggtgaaaggagccgcagcttccacccatttacttgactgataacccagtacacacaacgctaccgtgacggaaatgccgcgcgctgtgaagccgtggtgaatctttcgctgctgctcgttctctccacacacacaacagtattcagtcgactggtaccaacaggctatggtgagcaagggcgaggagctgttcaccggggtggtgcccatcctggtcgagctggacggcgacgtaaacggccacaagttcagcgtgtccggcgagggcgagggcgatgccacctacggcaagctgaccctgaagttcatctgcaccaccggcaagctgcccgtgccctggcccaccctcgtgaccaccctgacctacggcgtgcagtgcttcagccgctaccccgaccacatgaagcagcacgacttcttcaagtccgccatgcccgaaggctacgtccaggagcgcaccatcttcttcaaggacgacggcaactacaagacccgcgccgaggtgaagttcgagggcgacaccctggtgaaccgcatcgagctgaagggcatcgacttcaaggaggacggcaacatcctggggcacaagctggagtacaactacaacagccacaacgtctatatcatggccgacaagcagaagaacggcatcaaggtgaacttcaagatccgccacaacatcgaggacggcagcgtgcagctcgccgaccactaccagcagaacacccccatcggcgacggccccgtgctgctgcccgacaaccactacctgagcacccagtccgccctgagcaaagaccccaacgagaagcgcgatcacatggtcctgctggagttcgtgaccgccgccgggatcactctcggcatggacgagctgtacaagtcaggtggatcctagataacctttaccttcattccctgtaaattggtaccctgcaaagctttcgttcgtatcatcggtttcgacaacgttcgtcaagttcaatgcatcagtttcattgcgcacacaccagaatcctactgagtttgagtattatggcattgggaaaactgtttttcttgtaccatttgttgtgcttgtaatttactgtgttttttattcggttttcgctatcgaactgtgaaatggaaatggatggagaagagttaatgaatgatatggtccttttgttcattctcaaattaatattatttgttttttctcttatttgttgtgtgttgaatttgaaattataagagatatgcaaacattttgttttgagtaaaaatgtgtcaaatcgtggcctctaatgaccgaagttaatatgaggagtaaaacacttgtagttgtaccattatgcttattcactaggcaacaaatatattttcagacctagaaaagctgcaaatgttactgaatacaagtatgtcctcttgtgttttagacatttatgaactttcctttatgtaattttccagaatccttgtcagattctaatcattgctttataattatagttatactcatggatttgtagttgagtatgaaaatattttttaatgcattttatgacttgccaattgattgacaacatgcatcaatcgactagtcgacgagtcagtaataaacggcgtcaaagtggttgcagccggcacacacgagtcgtgtttatcaactcaaagcacaaatacttttcctcaacctaaaaataaggcaattagccaaaaacaactttgcgtgtaaacaacgctcaatacacgtgtcattttattattagctattgcttcaccgccttagctttctcgtgacctagtcgtcctcgtcttttcttcttcttcttctataaaacaatacccaaagagctcttcttcttcacaattcagatttcaatttctcaaaatcttaaaaactttctctcaattctctctaccgtgatcaaggtaaatttctgtgttccttattctctcaaaatcttcgattttgttttcgttcgatcccaatttcgtatatgttctttggtttagattctgttaatcttagatcgaagacgattttctgggtttgatcgttagatatcatcttaattctcgattagggtttcatagatatcatccgatttgttcaaataatttgagttttgtcgaataattactcttcgatttgtgatttctatctagatctggtgttagtttctagtttgtgcgatcgaatttgtagattaatctgagtttttctgattaacaccacaccaatctggtaccagaaaaggggagaagcaaaaccatgggtaaaaagcctgaactcaccgcgacgtctgtcgagaagtttctgatcgaaaagttcgacagcgtctccgacctgatgcagctctcggagggcgaagaatctcgtgctttcagcttcgatgtaggagggcgtggatatgtcctgcgggtaaatagctgcgccgatggtttctacaaagatcgttatgtttatcggcactttgcatcggccgcgctcccgattccggaagtgcttgacattggggcattcagcgagagcctgacctattgcatctcccgccgtgcacagggtgtcacgttgcaagacctgcctgaaaccgaactgcccgctgttctgcaaccggtcgcggaggcgatggatgccatcgctgcggccgatcttagccagacgagcgggttcggcccattcggaccgcaaggaatcggtcaatacactacatggcgtgatttcatatgcgcgattgctgatccccatgtgtatcactggcaaactgtgatggacgacaccgtcagtgcgtccgtcgcgcaggctctcgatgagctgatgctttgggccgaggactgccccgaagtccggcacctcgtgcacgcggatttcggctccaacaatgtcctgacggacaatggccgcataacagcggtcattgactggagcgaggcgatgttcggggattcccaatacgaggtcgccaacatcttcttctggaggccgtggttggcttgtatggagcagcagacgcgctacttcgagcggaggcatccggagcttgcaggatcgccgcggctccgggcgtatatgctccgcattggtcttgaccaactctatcagagcttggttgacggcaatttcgatgatgcagcttgggcgcagggtcgatgcgacgcaatcgtccgatccggagccgggactgtcgggcgtacacaaatcgcccgcagaagcgcggccgtctggaccgatggctgtgtagaagtactcgccgatagtggaaaccgacgccccagcactcgtccgagggcaaaggaatagatgcatcctgctttaatgagatatgcgagacgcctatgatcgcatgatatttgctttcaattctgttgtgcacgttgtaaaaaacctgagcatgtgtagctcagatccttaccgccggtttcggttcattctaatgaatatatcacccgttactatcgtatttttatgaataatattctccgttcaatttactgattgtaccctactacttatatgtacaatattaaaatgaaaacaatatattgtgctgaataggtttatagcgacatctatgatagagcgccacaataacaaacaattgcgttttattattacaaatccaattttaaaaaaagcggcagaaccggtcaaacctaaaagactgattacataaatcttattcaaatttcaaaagtgccccaggggctagtatctacgacacaccgagcggcgaactaataacgctcactgaagggaactccggttccccgccggcgcgcatgggtgagattccttgaagttgagtattggccgtccgctctaccgaaagttacgggcaccattcaacccggtccagcacggcggccgggtaaccgacttgctgccccgagaattatgcagcatttttttggtgtatgtgggccccaaatgaagtgcaggtcaaaccttgacagtgacgacaaatcgttgggcgggtccagggcgaattttgcgacaacatgtcgaggctcagcaggaccggcatgcaagctagcttactagtgatattctatagtgtcacctaaatgtattctagaccaagcatgcacagctggcgttctcagccagatccaacgttacaccacaatatatcctgccaagatctaattccggggatcggaaatccagaagcccgagaggttgccgcctttcgggctttttctttttcaaaaaaaaaaatttataaaacgatctgttgcggccggccgccgggttgtgggcaaaggcgctcgacggtgggcaaccgcttgcggttgtccacgggcggagccggtgcgcgtagcgcattgtccacaagccaagggcgaccaataattgatatatatattcataattgaaaagctaattgaacatactacttgctgtaactacttgccggagcgaggggtgtttgcaagctgttgatctgaaagggctattagcgttctcacgtgcctttttgattagcgatttcacgtgaccttattagcgatttcacgtactccgattagcgatttcacgtaccctgattagcgatttcacgtggatagtttttggagcgggccggaaagccccgtgaatcaaggctttgcggggcattagcggtttcacgtggataactaccctctatccacaggcttccggggataaaaaagcccgctcgacggcgggctgttggatggggatcgcctgaatcgccccatcatccagccagaaagtgagggagccacggttgatgagagctttgttgtaggtggaccagttggtgattttgaacttttgctttgccacggaacggtctgcgttgtcgggaagatgcgtgatctgatccttcaactcagcaaaagttcgatttattcaacaaagccacgttgtgtctcaaaatctctgatgttacattgcacaagataaaaatatatcatcatgaacaataaaactgtctgcttacataaacagtaatacaaggggtgttatgagggaagcggtgatcgccgaagtatcgactcaactatcagaggtagttggcgtcatcgagcgccatctcgaaccgacgttgctggccgtacatttgtacggctccgcagtggatggcggcctgaagccacacagtgatattgatttgctggttacggtgaccgtaaggcttgatgaaacaacgcggcgagctttgatcaacgaccttttggaaacttcggcttcccctggagagagcgagattctccgcgctgtagaagtcaccattgttgtgcacgacgacatcattccgtggcgttatccagctaagcgcgaactgcaatttggagaatggcagcgcaatgacattcttgcaggtatcttcgagccagccacgatcgacattgatctggctatcttgctgacaaaagcaagagaacatagcgttgccttggtaggtccagcggcggaggaactctttgatccggttcctgaacaggatctatttgaggcgctaaatgaaaccttaacgctatggaactcgccgcccgactgggctggcgatgagcgaaatgtagtgcttacgttgtcccgcatttggtacagcgcagtaaccggcaaaatcgcgccgaaggatgtcgctgccgactgggcaatggagcgcctgccggcccagtatcagcccgtcatacttgaagctaggcaggcttatcttggacaagaagatcgcttggcctcgcgcgcagatcagttggaagaatttgttcactacgtgaaaggcgagatcaccaaggtagtcggcaaataatcactagaccaatgttacacatatatactttagattgatttaaaacttcatttttaatttaaaaggatctaggtgaagatcctttttgataatctcatgaccaaaatcccttaacgtgagttttcgttccactgagcgtcagaccccgtagaaaagatcaaaggatcttcttgagatcctttttttctgcgcgtaatctgctgcttgcaaacaaaaaaaccaccgctaccagcggtggtttgtttgccggatcaagagctaccaactcttcttccgaaggtaactggcttcagcagagcgcagataccaaatactgttcttctagtgtagccgtagttaggccaccacttcaagaactctgtagcaccgcctacatacctcgctctgctaatcctgttaccagtggctgctgccagtggcgataagtcgtgtcttaccgggttggactcaagacgatagttaccggataaggcgcagcggtcgggctgaacggggggttcgtgcacacagcccagcttggagcgaacgacctacaccgaactgagatacctacagcgtgagctatgagaaagcgccacgcttcccgaagggagaaaggcggacaggtatccggtaagcggcagggtcggaacaggagagcgcacgagggagcttccagggggaaacgcctggtatctttatagtcctgtcgggtttcgccacctctgacttgagcgtcgatttttgtgatgctcgtcaggggggcggagcctatggaaaaacgccagcaacgcggcctttttacggttcctggccttttgctggccttttgctcacatgagatctcaaacaaacacatacagcgacttagtttacccgccaatatatcctgtcaaggctcgaactaggctcggacgaagtaagcggccgcaaccttaattaaacacggcgcgccaacagcgatcgcaccaggtacc

SEQ ID NO: 300 - DNA, 7247 bp, synthetic construct
  source 1..7247: mol_type = other DNA; note = pAGS-0030 MAS promoter
acctgcaatctcacgcaccaggcgctggaagggcaacttgcggatgagaaggtccgtggacttctggtaacgacggatctcacgcagagcgacggttccagggcgataacggtggggcttcttgactcctccggtagccggagcggacttacgggcagccttggtggcaagctgcttgcgcggcgctttgcctccggtggatttacgggcggtttgcttggttcgggccattttgacggttttttttacaagagaagagttcttgaaatttgtgaggttaaagtgtgtggcttccgccgtagtcaaggagcgtgcggttgccgatcgcaccggtacgttctgtagaaatgaacacagtgtgttgaattgaaagtatggcgcaggtatggtgtgtgataagtagcagccgcgccgagacaaacaaactttggtttctacgacaatctctgtagacaagtactagaaacccgtttgaacgagcataaatctgcaccggcaggccaccagacatcgtttcaacgtaatattctacgtaaccattttatcccaggaaacctacggcctgtgaaccactgaaaggaagcactcacaattcgctctcggcaacaaccgacaatagtcttactcacagtcaataccgaaaacaaacaacagaacagtattcagtcgactggtaccaacaggctatggtgagcaagggcgaggagctgttcaccggggtggtgcccatcctggtcgagctggacggcgacgtaaacggccacaagttcagcgtgtccggcgagggcgagggcgatgccacctacggcaagctgaccctgaagttcatctgcaccaccggcaagctgcccgtgccctggcccaccctcgtgaccaccctgacctacggcgtgcagtgcttcagccgctaccccgaccacatgaagcagcacgacttcttcaagtccgccatgcccgaaggctacgtccaggagcgcaccatcttcttcaaggacgacggcaactacaagacccgcgccgaggtgaagttcgagggcgacaccctggtgaaccgcatcgagctgaagggcatcgacttcaaggaggacggcaacatcctggggcacaagctggagtacaactacaacagccacaacgtctatatcatggccgacaagcagaagaacggcatcaaggtgaacttcaagatccgccacaacatcgaggacggcagcgtgcagctcgccgaccactaccagcagaacacccccatcggcgacggccccgtgctgctgcccgacaaccactacctgagcacccagtccgccctgagcaaagaccccaacgagaagcgcgatcacatggtcctgctggagttcgtgaccgccgccgggatcactctcggcatggacgagctgtacaagtcaggtggatcctagataacctttaccttcattccctgtaaattggtaccctgcaaagctttcgttcgtatcatcggtttcgacaacgttcgtcaagttcaatgcatcagtttcattgcgcacacaccagaatcctactgagtttgagtattatggcattgggaaaactgtttttcttgtaccatttgttgtgcttgtaatttactgtgttttttattcggttttcgctatcgaactgtgaaatggaaatggatggagaagagttaatgaatgatatggtccttttgttcattctcaaattaatattatttgttttttctcttatttgttgtgtgttgaatttgaaattataagagatatgcaaacattttgttttgagtaaaaatgtgtcaaatcgtggcctctaatgaccgaagttaatatgaggagtaaaacacttgtagttgtaccattatgcttattcactaggcaacaaatatattttcagacctagaaaagctgcaaatgttactgaatacaagtatgtcctcttgtgttttagacatttatgaactttcctttatgtaattttccagaatccttgtcagattctaatcattgctttataattatagttatactcatggatttgtagttgagtatgaaaatattttttaatgcattttatgacttgccaattgattgacaacatgcatcaatcgactagtcgacgagtcagtaataaacggcgtcaaagtggttgcagccggcacacacgagtcgtgtttatcaactcaaagcacaaatacttttcctcaacctaaaaataaggcaattagccaaaaacaactttgcgtgtaaacaacgctcaatacacgtgtcattttattattagctattgcttcaccgccttagctttctcgtgacctagtcgtcctcgtcttttcttcttcttcttctataaaacaatacccaaagagctcttcttcttcacaattcagatttcaatttctcaaaatcttaaaaactttctctcaattctctctaccgtgatcaaggtaaatttctgtgttccttattctctcaaaatcttcgattttgttttcgttcgatcccaatttcgtatatgttctttggtttagattctgttaatcttagatcgaagacgattttctgggtttgatcgttagatatcatcttaattctcgattagggtttcatagatatcatccgatttgttcaaataatttgagttttgtcgaataattactcttcgatttgtgatttctatctagatctggtgttagtttctagtttgtgcgatcgaatttgtagattaatctgagtttttctgattaacaccacaccaatctggtaccagaaaaggggagaagcaaaaccatgggtaaaaagcctgaactcaccgcgacgtctgtcgagaagtttctgatcgaaaagttcgacagcgtctccgacctgatgcagctctcggagggcgaagaatctcgtgctttcagcttcgatgtaggagggcgtggatatgtcctgcgggtaaatagctgcgccgatggtttctacaaagatcgttatgtttatcggcactttgcatcggccgcgctcccgattccggaagtgcttgacattggggcattcagcgagagcctgacctattgcatctcccgccgtgcacagggtgtcacgttgcaagacctgcctgaaaccgaactgcccgctgttctgcaaccggtcgcggaggcgatggatgccatcgctgcggccgatcttagccagacgagcgggttcggcccattcggaccgcaaggaatcggtcaatacactacatggcgtgatttcatatgcgcgattgctgatccccatgtgtatcactggcaaactgtgatggacgacaccgtcagtgcgtccgtcgcgcaggctctcgatgagctgatgctttgggccgaggactgccccgaagtccggcacctcgtgcacgcggatttcggctccaacaatgtcctgacggacaatggccgcataacagcggtcattgactggagcgaggcgatgttcggggattcccaatacgaggtcgccaacatcttcttctggaggccgtggttggcttgtatggagcagcagacgcgctacttcgagcggaggcatccggagcttgcaggatcgccgcggctccgggcgtatatgctccgcattggtcttgaccaactctatcagagcttggttgacggcaatttcgatgatgcagcttgggcgcagggtcgatgcgacgcaatcgtccgatccggagccgggactgtcgggcgtacacaaatcgcccgcagaagcgcggccgtctggaccgatggctgtgtagaagtactcgccgatagtggaaaccgacgccccagcactcgtccgagggcaaaggaatagatgcatcctgctttaatgagatatgcgagacgcctatgatcgcatgatatttgctttcaattctgttgtgcacgttgtaaaaaacctgagcatgtgtagctcagatccttaccgccggtttcggttcattctaatgaatatatcacccgttactatcgtatttttatgaataatattctccgttcaatttactgattgtaccctactacttatatgtacaatattaaaatgaaaacaatatattgtgctgaataggtttatagcgacatctatgatagagcgccacaataacaaacaattgcgttttattattacaaatccaattttaaaaaaagcggcagaaccggtcaaacctaaaagactgattacataaatcttattcaaatttcaaaagtgccccaggggctagtatctacgacacaccgagcggcgaactaataacgctcactgaagggaactccggttccccgccggcgcgcatgggtgagattccttgaagttgagtattggccgtccgctctaccgaaagttacgggcaccattcaacccggtccagcacggcggccgggtaaccgacttgctgccccgagaattatgcagcatttttttggtgtatgtgggccccaaatgaagtgcaggtcaaaccttgacagtgacgacaaatcgttgggcgggtccagggcgaattttgcgacaacatgtcgaggctcagcaggaccggcatgcaagctagcttactagtgatattctatagtgtcacctaaatgtattctagaccaagcatgcacagctggcgttctcagccagatccaacgttacaccacaatatatcctgccaagatctaattccggggatcggaaatccagaagcccgagaggttgccgcctttcgggctttttctttttcaaaaaaaaaaatttataaaacgatctgttgcggccggccgccgggttgtgggcaaaggcgctcgacggtgggcaaccgcttgcggttgtccacgggcggagccggtgcgcgtagcgcattgtccacaagccaagggcgaccaataattgatatatatattcataattgaaaagctaattgaacatactacttgctgtaactacttgccggagcgaggggtgtttgcaagctgttgatctgaaagggctattagcgttctcacgtgcctttttgattagcgatttcacgtgaccttattagcgatttcacgtactccgattagcgatttcacgtaccctgattagcgatttcacgtggatagtttttggagcgggccggaaagccccgtgaatcaaggctttgcggggcattagcggtttcacgtggataactaccctctatccacaggcttccggggataaaaaagcccgctcgacggcgggctgttggatggggatcgcctgaatcgccccatcatccagccagaaagtgagggagccacggttgatgagagctttgttgtaggtggaccagttggtgattttgaacttttgctttgccacggaacggtctgcgttgtcgggaagatgcgtgatctgatccttcaactcagcaaaagttcgatttattcaacaaagccacgttgtgtctcaaaatctctgatgttacattgcacaagataaaaatatatcatcatgaacaataaaactgtctgcttacataaacagtaatacaaggggtgttatgagggaagcggtgatcgccgaagtatcgactcaactatcagaggtagttggcgtcatcgagcgccatctcgaaccgacgttgctggccgtacatttgtacggctccgcagtggatggcggcctgaagccacacagtgatattgatttgctggttacggtgaccgtaaggcttgatgaaacaacgcggcgagctttgatcaacgaccttttggaaacttcggcttcccctggagagagcgagattctccgcgctgtagaagtcaccattgttgtgcacgacgacatcattccgtggcgttatccagctaagcgcgaactgcaatttggagaatggcagcgcaatgacattcttgcaggtatcttcgagccagccacgatcgacattgatctggctatcttgctgacaaaagcaagagaacatagcgttgccttggtaggtccagcggcggaggaactctttgatccggttcctgaacaggatctatttgaggcgctaaatgaaaccttaacgctatggaactcgccgcccgactgggctggcgatgagcgaaatgtagtgcttacgttgtcccgcatttggtacagcgcagtaaccggcaaaatcgcgccgaaggatgtcgctgccgactgggcaatggagcgcctgccggcccagtatcagcccgtcatacttgaagctaggcaggcttatcttggacaagaagatcgcttggcctcgcgcgcagatcagttggaagaatttgttcactacgtgaaaggcgagatcaccaaggtagtcggcaaataatcactagaccaatgttacacatatatactttagattgatttaaaacttcatttttaatttaaaaggatctaggtgaagatcctttttgataatctcatgaccaaaatcccttaacgtgagttttcgttccactgagcgtcagaccccgtagaaaagatcaaaggatcttcttgagatcctttttttctgcgcgtaatctgctgcttgcaaacaaaaaaaccaccgctaccagcggtggtttgtttgccggatcaagagctaccaactcttcttccgaaggtaactggcttcagcagagcgcagataccaaatactgttcttctagtgtagccgtagttaggccaccacttcaagaactctgtagcaccgcctacatacctcgctctgctaatcctgttaccagtggctgctgccagtggcgataagtcgtgtcttaccgggttggactcaagacgatagttaccggataaggcgcagcggtcgggctgaacggggggttcgtgcacacagcccagcttggagcgaacgacctacaccgaactgagatacctacagcgtgagctatgagaaagcgccacgcttcccgaagggagaaaggcggacaggtatccggtaagcggcagggtcggaacaggagagcgcacgagggagcttccagggggaaacgcctggtatctttatagtcctgtcgggtttcgccacctctgacttgagcgtcgatttttgtgatgctcgtcaggggggcggagcctatggaaaaacgccagcaacgcggcctttttacggttcctggccttttgctggccttttgctcacatgagatctcaaacaaacacatacagcgacttagtttacccgccaatatatcctgtcaaggctcgaactaggctcggacgaagtaagcggccgcaaccttaattaaacacggcgcgccaacagcgatcgcaccaggtacc

SEQ ID NO: 301 - DNA, 6737 bp, synthetic construct
  source 1..6737: mol_type = other DNA; note = pAGS-0031 PAR promoter
acctgctgcaggacgcaatggaggattatcaccgcaaaaatgaacttcgaaaaaaactttcgagcgaccatggaaaaggaggatcagattcagattacaacagtggattgctctggtagcaaatatcttctgctagattggctcaacagtattcagtcgactggtaccaacaggctatggtgagcaagggcgaggagctgttcaccggggtggtgcccatcctggtcgagctggacggcgacgtaaacggccacaagttcagcgtgtccggcgagggcgagggcgatgccacctacggcaagctgaccctgaagttcatctgcaccaccggcaagctgcccgtgccctggcccaccctcgtgaccaccctgacctacggcgtgcagtgcttcagccgctaccccgaccacatgaagcagcacgacttcttcaagtccgccatgcccgaaggctacgtccaggagcgcaccatcttcttcaaggacgacggcaactacaagacccgcgccgaggtgaagttcgagggcgacaccctggtgaaccgcatcgagctgaagggcatcgacttcaaggaggacggcaacatcctggggcacaagctggagtacaactacaacagccacaacgtctatatcatggccgacaagcagaagaacggcatcaaggtgaacttcaagatccgccacaacatcgaggacggcagcgtgcagctcgccgaccactaccagcagaacacccccatcggcgacggccccgtgctgctgcccgacaaccactacctgagcacccagtccgccctgagcaaagaccccaacgagaagcgcgatcacatggtcctgctggagttcgtgaccgccgccgggatcactctcggcatggacgagctgtacaagtcaggtggatcctagataacctttaccttcattccctgtaaattggtaccctgcaaagctttcgttcgtatcatcggtttcgacaacgttcgtcaagttcaatgcatcagtttcattgcgcacacaccagaatcctactgagtttgagtattatggcattgggaaaactgtttttcttgtaccatttgttgtgcttgtaatttactgtgttttttattcggttttcgctatcgaactgtgaaatggaaatggatggagaagagttaatgaatgatatggtccttttgttcattctcaaattaatattatttgttttttctcttatttgttgtgtgttgaatttgaaattataagagatatgcaaacattttgttttgagtaaaaatgtgtcaaatcgtggcctctaatgaccgaagttaatatgaggagtaaaacacttgtagttgtaccattatgcttattcactaggcaacaaatatattttcagacctagaaaagctgcaaatgttactgaatacaagtatgtcctcttgtgttttagacatttatgaactttcctttatgtaattttccagaatccttgtcagattctaatcattgctttataattatagttatactcatggatttgtagttgagtatgaaaatattttttaatgcattttatgacttgccaattgattgacaacatgcatcaatcgactagtcgacgagtcagtaataaacggcgtcaaagtggttgcagccggcacacacgagtcgtgtttatcaactcaaagcacaaatacttttcctcaacctaaaaataaggcaattagccaaaaacaactttgcgtgtaaacaacgctcaatacacgtgtcattttattattagctattgcttcaccgccttagctttctcgtgacctagtcgtcctcgtcttttcttcttcttcttctataaaacaatacccaaagagctcttcttcttcacaattcagatttcaatttctcaaaatcttaaaaactttctctcaattctctctaccgtgatcaaggtaaatttctgtgttccttattctctcaaaatcttcgattttgttttcgttcgatcccaatttcgtatatgttctttggtttagattctgttaatcttagatcgaagacgattttctgggtttgatcgttagatatcatcttaattctcgattagggtttcatagatatcatccgatttgttcaaataatttgagttttgtcgaataattactcttcgatttgtgatttctatctagatctggtgttagtttctagtttgtgcgatcgaatttgtagattaatctgagtttttctgattaacaccacaccaatctggtaccagaaaaggggagaagcaaaaccatgggtaaaaagcctgaactcaccgcgacgtctgtcgagaagtttctgatcgaaaagttcgacagcgtctccgacctgatgcagctctcggagggcgaagaatctcgtgctttcagcttcgatgtaggagggcgtggatatgtcctgcgggtaaatagctgcgccgatggtttctacaaagatcgttatgtttatcggcactttgcatcggccgcgctcccgattccggaagtgcttgacattggggcattcagcgagagcctgacctattgcatctcccgccgtgcacagggtgtcacgttgcaagacctgcctgaaaccgaactgcccgctgttctgcaaccggtcgcggaggcgatggatgccatcgctgcggccgatcttagccagacgagcgggttcggcccattcggaccgcaaggaatcggtcaatacactacatggcgtgatttcatatgcgcgattgctgatccccatgtgtatcactggcaaactgtgatggacgacaccgtcagtgcgtccgtcgcgcaggctctcgatgagctgatgctttgggccgaggactgccccgaagtccggcacctcgtgcacgcggatttcggctccaacaatgtcctgacggacaatggccgcataacagcggtcattgactggagcgaggcgatgttcggggattcccaatacgaggtcgccaacatcttcttctggaggccgtggttggcttgtatggagcagcagacgcgctacttcgagcggaggcatccggagcttgcaggatcgccgcggctccgggcgtatatgctccgcattggtcttgaccaactctatcagagcttggttgacggcaatttcgatgatgcagcttgggcgcagggtcgatgcgacgcaatcgtccgatccggagccgggactgtcgggcgtacacaaatcgcccgcagaagcgcggccgtctggaccgatggctgtgtagaagtactcgccgatagtggaaaccgacgccccagcactcgtccgagggcaaaggaatagatgcatcctgctttaatgagatatgcgagacgcctatgatcgcatgatatttgctttcaattctgttgtgcacgttgtaaaaaacctgagcatgtgtagctcagatccttaccgccggtttcggttcattctaatgaatatatcacccgttactatcgtatttttatgaataatattctccgttcaatttactgattgtaccctactacttatatgtacaatattaaaatgaaaacaatatattgtgctgaataggtttatagcgacatctatgatagagcgccacaataacaaacaattgcgttttattattacaaatccaattttaaaaaaagcggcagaaccggtcaaacctaaaagactgattacataaatcttattcaaatttcaaaagtgccccaggggctagtatctacgacacaccgagcggcgaactaataacgctcactgaagggaactccggttccccgccggcgcgcatgggtgagattccttgaagttgagtattggccgtccgctctaccgaaagttacgggcaccattcaacccggtccagcacggcggccgggtaaccgacttgctgccccgagaattatgcagcatttttttggtgtatgtgggccccaaatgaagtgcaggtcaaaccttgacagtgacgacaaatcgttgggcgggtccagggcgaattttgcgacaacatgtcgaggctcagcaggaccggcatgcaagctagcttactagtgatattctatagtgtcacctaaatgtattctagaccaagcatgcacagctggcgttctcagccagatccaacgttacaccacaatatatcctgccaagatctaattccggggatcggaaatccagaagcccgagaggttgccgcctttcgggctttttctttttcaaaaaaaaaaatttataaaacgatctgttgcggccggccgccgggttgtgggcaaaggcgctcgacggtgggcaaccgcttgcggttgtccacgggcggagccggtgcgcgtagcgcattgtccacaagccaagggcgaccaataattgatatatatattcataattgaaaagctaattgaacatactacttgctgtaactacttgccggagcgaggggtgtttgcaagctgttgatctgaaagggctattagcgttctcacgtgcctttttgattagcgatttcacgtgaccttattagcgatttcacgtactccgattagcgatttcacgtaccctgattagcgatttcacgtggatagtttttggagcgggccggaaagccccgtgaatcaaggctttgcggggcattagcggtttcacgtggataactaccctctatccacaggcttccggggataaaaaagcccgctcgacggcgggctgttggatggggatcgcctgaatcgccccatcatccagccagaaagtgagggagccacggttgatgagagctttgttgtaggtggaccagttggtgattttgaacttttgctttgccacggaacggtctgcgttgtcgggaagatgcgtgatctgatccttcaactcagcaaaagttcgatttattcaacaaagccacgttgtgtctcaaaatctctgatgttacattgcacaagataaaaatatatcatcatgaacaataaaactgtctgcttacataaacagtaatacaaggggtgttatgagggaagcggtgatcgccgaagtatcgactcaactatcagaggtagttggcgtcatcgagcgccatctcgaaccgacgttgctggccgtacatttgtacggctccgcagtggatggcggcctgaagccacacagtgatattgatttgctggttacggtgaccgtaaggcttgatgaaacaacgcggcgagctttgatcaacgaccttttggaaacttcggcttcccctggagagagcgagattctccgcgctgtagaagtcaccattgttgtgcacgacgacatcattccgtggcgttatccagctaagcgcgaactgcaatttggagaatggcagcgcaatgacattcttgcaggtatcttcgagccagccacgatcgacattgatctggctatcttgctgacaaaagcaagagaacatagcgttgccttggtaggtccagcggcggaggaactctttgatccggttcctgaacaggatctatttgaggcgctaaatgaaaccttaacgctatggaactcgccgcccgactgggctggcgatgagcgaaatgtagtgcttacgttgtcccgcatttggtacagcgcagtaaccggcaaaatcgcgccgaaggatgtcgctgccgactgggcaatggagcgcctgccggcccagtatcagcccgtcatacttgaagctaggcaggcttatcttggacaagaagatcgcttggcctcgcgcgcagatcagttggaagaatttgttcactacgtgaaaggcgagatcaccaaggtagtcggcaaataatcactagaccaatgttacacatatatactttagattgatttaaaacttcatttttaatttaaaaggatctaggtgaagatcctttttgataatctcatgaccaaaatcccttaacgtgagttttcgttccactgagcgtcagaccccgtagaaaagatcaaaggatcttcttgagatcctttttttctgcgcgtaatctgctgcttgcaaacaaaaaaaccaccgctaccagcggtggtttgtttgccggatcaagagctaccaactcttcttccgaaggtaactggcttcagcagagcgcagataccaaatactgttcttctagtgtagccgtagttaggccaccacttcaagaactctgtagcaccgcctacatacctcgctctgctaatcctgttaccagtggctgctgccagtggcgataagtcgtgtcttaccgggttggactcaagacgatagttaccggataaggcgcagcggtcgggctgaacggggggttcgtgcacacagcccagcttggagcgaacgacctacaccgaactgagatacctacagcgtgagctatgagaaagcgccacgcttcccgaagggagaaaggcggacaggtatccggtaagcggcagggtcggaacaggagagcgcacgagggagcttccagggggaaacgcctggtatctttatagtcctgtcgggtttcgccacctctgacttgagcgtcgatttttgtgatgctcgtcaggggggcggagcctatggaaaaacgccagcaacgcggcctttttacggttcctggccttttgctggccttttgctcacatgagatctcaaacaaacacatacagcgacttagtttacccgccaatatatcctgtcaaggctcgaactaggctcggacgaagtaagcggccgcaaccttaattaaacacggcgcgccaacagcgatcgcaccaggtacc

SEQ ID NO: 302 - DNA, 6860 bp, synthetic construct
  source 1..6860: mol_type = other DNA; note = pAGS-0032 Cv PAS D promoter
acctactacgttagagcgctaacgagaatacttcatataccgtattttttacgataataataatgtaatgtgaaattgctatccaaaaggcacctaattttgtccaccgttcaaaggaaaggacaaggaagtagtagcgtgtaggtttggtgctgtacaaaataagcaagacacgtgttgccttattataggataatccataaggcaatttcgtcttaagtcggccattgcacctttaaaaggagcctctttgttcccaaaatcttcaacagtattcagtcgactggtaccaacaggctatggtgagcaagggcgaggagctgttcaccggggtggtgcccatcctggtcgagctggacggcgacgtaaacggccacaagttcagcgtgtccggcgagggcgagggcgatgccacctacggcaagctgaccctgaagttcatctgcaccaccggcaagctgcccgtgccctggcccaccctcgtgaccaccctgacctacggcgtgcagtgcttcagccgctaccccgaccacatgaagcagcacgacttcttcaagtccgccatgcccgaaggctacgtccaggagcgcaccatcttcttcaaggacgacggcaactacaagacccgcgccgaggtgaagttcgagggcgacaccctggtgaaccgcatcgagctgaagggcatcgacttcaaggaggacggcaacatcctggggcacaagctggagtacaactacaacagccacaacgtctatatcatggccgacaagcagaagaacggcatcaaggtgaacttcaagatccgccacaacatcgaggacggcagcgtgcagctcgccgaccactaccagcagaacacccccatcggcgacggccccgtgctgctgcccgacaaccactacctgagcacccagtccgccctgagcaaagaccccaacgagaagcgcgatcacatggtcctgctggagttcgtgaccgccgccgggatcactctcggcatggacgagctgtacaagtcaggtggatcctagataacctttaccttcattccctgtaaattggtaccctgcaaagctttcgttcgtatcatcggtttcgacaacgttcgtcaagttcaatgcatcagtttcattgcgcacacaccagaatcctactgagtttgagtattatggcattgggaaaactgtttttcttgtaccatttgttgtgcttgtaatttactgtgttttttattcggttttcgctatcgaactgtgaaatggaaatggatggagaagagttaatgaatgatatggtccttttgttcattctcaaattaatattatttgttttttctcttatttgttgtgtgttgaatttgaaattataagagatatgcaaacattttgttttgagtaaaaatgtgtcaaatcgtggcctctaatgaccgaagttaatatgaggagtaaaacacttgtagttgtaccattatgcttattcactaggcaacaaatatattttcagacctagaaaagctgcaaatgttactgaatacaagtatgtcctcttgtgttttagacatttatgaactttcctttatgtaattttccagaatccttgtcagattctaatcattgctttataattatagttatactcatggatttgtagttgagtatgaaaatattttttaatgcattttatgacttgccaattgattgacaacatgcatcaatcgactagtcgacgagtcagtaataaacggcgtcaaagtggttgcagccggcacacacgagtcgtgtttatcaactcaaagcacaaatacttttcctcaacctaaaaataaggcaattagccaaaaacaactttgcgtgtaaacaacgctcaatacacgtgtcattttattattagctattgcttcaccgccttagctttctcgtgacctagtcgtcctcgtcttttcttcttcttcttctataaaacaatacccaaagagctcttcttcttcacaattcagatttcaatttctcaaaatcttaaaaactttctctcaattctctctaccgtgatcaaggtaaatttctgtgttccttattctctcaaaatcttcgattttgttttcgttcgatcccaatttcgtatatgttctttggtttagattctgttaatcttagatcgaagacgattttctgggtttgatcgttagatatcatcttaattctcgattagggtttcatagatatcatccgatttgttcaaataatttgagttttgtcgaataattactcttcgatttgtgatttctatctagatctggtgttagtttctagtttgtgcgatcgaatttgtagattaatctgagtttttctgattaacaccacaccaatctggtaccagaaaaggggagaagcaaaaccatgggtaaaaagcctgaactcaccgcgacgtctgtcgagaagtttctgatcgaaaagttcgacagcgtctccgacctgatgcagctctcggagggcgaagaatctcgtgctttcagcttcgatgtaggagggcgtggatatgtcctgcgggtaaatagctgcgccgatggtttctacaaagatcgttatgtttatcggcactttgcatcggccgcgctcccgattccggaagtgcttgacattggggcattcagcgagagcctgacctattgcatctcccgccgtgcacagggtgtcacgttgcaagacctgcctgaaaccgaactgcccgctgttctgcaaccggtcgcggaggcgatggatgccatcgctgcggccgatcttagccagacgagcgggttcggcccattcggaccgcaaggaatcggtcaatacactacatggcgtgatttcatatgcgcgattgctgatccccatgtgtatcactggcaaactgtgatggacgacaccgtcagtgcgtccgtcgcgcaggctctcgatgagctgatgctttgggccgaggactgccccgaagtccggcacctcgtgcacgcggatttcggctccaacaatgtcctgacggacaatggccgcataacagcggtcattgactggagcgaggcgatgttcggggattcccaatacgaggtcgccaacatcttcttctggaggccgtggttggcttgtatggagcagcagacgcgctacttcgagcggaggcatccggagcttgcaggatcgccgcggctccgggcgtatatgctccgcattggtcttgaccaactctatcagagcttggttgacggcaatttcgatgatgcagcttgggcgcagggtcgatgcgacgcaatcgtccgatccggagccgggactgtcgggcgtacacaaatcgcccgcagaagcgcggccgtctggaccgatggctgtgtagaagtactcgccgatagtggaaaccgacgccccagcactcgtccgagggcaaaggaatagatgcatcctgctttaatgagatatgcgagacgcctatgatcgcatgatatttgctttcaattctgttgtgcacgttgtaaaaaacctgagcatgtgtagctcagatccttaccgccggtttcggttcattctaatgaatatatcacccgttactatcgtatttttatgaataatattctccgttcaatttactgattgtaccctactacttatatgtacaatattaaaatgaaaacaatatattgtgctgaataggtttatagcgacatctatgatagagcgccacaataacaaacaattgcgttttattattacaaatccaattttaaaaaaagcggcagaaccggtcaaacctaaaagactgattacataaatcttattcaaatttcaaaagtgccccaggggctagtatctacgacacaccgagcggcgaactaataacgctcactgaagggaactccggttccccgccggcgcgcatgggtgagattccttgaagttgagtattggccgtccgctctaccgaaagttacgggcaccattcaacccggtccagcacggcggccgggtaaccgacttgctgccccgagaattatgcagcatttttttggtgtatgtgggccccaaatgaagtgcaggtcaaaccttgacagtgacgacaaatcgttgggcgggtccagggcgaattttgcgacaacatgtcgaggctcagcaggaccggcatgcaagctagcttactagtgatattctatagtgtcacctaaatgtattctagaccaagcatgcacagctggcgttctcagccagatccaacgttacaccacaatatatcctgccaagatctaattccggggatcggaaatccagaagcccgagaggttgccgcctttcgggctttttctttttcaaaaaaaaaaatttataaaacgatctgttgcggccggccgccgggttgtgggcaaaggcgctcgacggtgggcaaccgcttgcggttgtccacgggcggagccggtgcgcgtagcgcattgtccacaagccaagggcgaccaataattgatatatatattcataattgaaaagctaattgaacatactacttgctgtaactacttgccggagcgaggggtgtttgcaagctgttgatctgaaagggctattagcgttctcacgtgcctttttgattagcgatttcacgtgaccttattagcgatttcacgtactccgattagcgatttcacgtaccctgattagcgatttcacgtggatagtttttggagcgggccggaaagccccgtgaatcaaggctttgcggggcattagcggtttcacgtggataactaccctctatccacaggcttccggggataaaaaagcccgctcgacggcgggctgttggatggggatcgcctgaatcgccccatcatccagccagaaagtgagggagccacggttgatgagagctttgttgtaggtggaccagttggtgattttgaacttttgctttgccacggaacggtctgcgttgtcgggaagatgcgtgatctgatccttcaactcagcaaaagttcgatttattcaacaaagccacgttgtgtctcaaaatctctgatgttacattgcacaagataaaaatatatcatcatgaacaataaaactgtctgcttacataaacagtaatacaaggggtgttatgagggaagcggtgatcgccgaagtatcgactcaactatcagaggtagttggcgtcatcgagcgccatctcgaaccgacgttgctggccgtacatttgtacggctccgcagtggatggcggcctgaagccacacagtgatattgatttgctggttacggtgaccgtaaggcttgatgaaacaacgcggcgagctttgatcaacgaccttttggaaacttcggcttcccctggagagagcgagattctccgcgctgtagaagtcaccattgttgtgcacgacgacatcattccgtggcgttatccagctaagcgcgaactgcaatttggagaatggcagcgcaatgacattcttgcaggtatcttcgagccagccacgatcgacattgatctggctatcttgctgacaaaagcaagagaacatagcgttgccttggtaggtccagcggcggaggaactctttgatccggttcctgaacaggatctatttgaggcgctaaatgaaaccttaacgctatggaactcgccgcccgactgggctggcgatgagcgaaatgtagtgcttacgttgtcccgcatttggtacagcgcagtaaccggcaaaatcgcgccgaaggatgtcgctgccgactgggcaatggagcgcctgccggcccagtatcagcccgtcatacttgaagctaggcaggcttatcttggacaagaagatcgcttggcctcgcgcgcagatcagttggaagaatttgttcactacgtgaaaggcgagatcaccaaggtagtcggcaaataatcactagaccaatgttacacatatatactttagattgatttaaaacttcatttttaatttaaaaggatctaggtgaagatcctttttgataatctcatgaccaaaatcccttaacgtgagttttcgttccactgagcgtcagaccccgtagaaaagatcaaaggatcttcttgagatcctttttttctgcgcgtaatctgctgcttgcaaacaaaaaaaccaccgctaccagcggtggtttgtttgccggatcaagagctaccaactcttcttccgaaggtaactggcttcagcagagcgcagataccaaatactgttcttctagtgtagccgtagttaggccaccacttcaagaactctgtagcaccgcctacatacctcgctctgctaatcctgttaccagtggctgctgccagtggcgataagtcgtgtcttaccgggttggactcaagacgatagttaccggataaggcgcagcggtcgggctgaacggggggttcgtgcacacagcccagcttggagcgaacgacctacaccgaactgagatacctacagcgtgagctatgagaaagcgccacgcttcccgaagggagaaaggcggacaggtatccggtaagcggcagggtcggaacaggagagcgcacgagggagcttccagggggaaacgcctggtatctttatagtcctgtcgggtttcgccacctctgacttgagcgtcgatttttgtgatgctcgtcaggggggcggagcctatggaaaaacgccagcaacgcggcctttttacggttcctggccttttgctggccttttgctcacatgagatctcaaacaaacacatacagcgacttagtttacccgccaatatatcctgtcaaggctcgaactaggctcggacgaagtaagcggccgcaaccttaattaaacacggcgcgccaacagcgatcgcaccaggtacc

SEQ ID NO: 303 - DNA, 6995 bp, synthetic construct
  source 1..6995: mol_type = other DNA; note = pAGS-0033 CMV promoter
acctcctactccaaaaatgtcaaagatacagtctcagaagaccaaagggctattgagacttttcaacaaagggtaatatcgggaaacctcctcggattccattgcccagctatctgtcacttcatcaaaaggacagtagaaaaggaaggtggcacctacaaatgccatcattgcgataaaggaaaggctatcgttcaagatgcccctgccgacagtggtcccaaagatggacccccacccacgaggagcatcgtggaaaaagaagacgttccaaccacgtcttcaaagcaagtggattgatgtgatatctccactgacgtaagggatgacgcacaatcccactatccttcgcaagacccttcctctatataaggaagttcatttcatttggagaggacagccaacagtattcagtcgactggtaccaacaggctatggtgagcaagggcgaggagctgttcaccggggtggtgcccatcctggtcgagctggacggcgacgtaaacggccacaagttcagcgtgtccggcgagggcgagggcgatgccacctacggcaagctgaccctgaagttcatctgcaccaccggcaagctgcccgtgccctggcccaccctcgtgaccaccctgacctacggcgtgcagtgcttcagccgctaccccgaccacatgaagcagcacgacttcttcaagtccgccatgcccgaaggctacgtccaggagcgcaccatcttcttcaaggacgacggcaactacaagacccgcgccgaggtgaagttcgagggcgacaccctggtgaaccgcatcgagctgaagggcatcgacttcaaggaggacggcaacatcctggggcacaagctggagtacaactacaacagccacaacgtctatatcatggccgacaagcagaagaacggcatcaaggtgaacttcaagatccgccacaacatcgaggacggcagcgtgcagctcgccgaccactaccagcagaacacccccatcggcgacggccccgtgctgctgcccgacaaccactacctgagcacccagtccgccctgagcaaagaccccaacgagaagcgcgatcacatggtcctgctggagttcgtgaccgccgccgggatcactctcggcatggacgagctgtacaagtcaggtggatcctagataacctttaccttcattccctgtaaattggtaccctgcaaagctttcgttcgtatcatcggtttcgacaacgttcgtcaagttcaatgcatcagtttcattgcgcacacaccagaatcctactgagtttgagtattatggcattgggaaaactgtttttcttgtaccatttgttgtgcttgtaatttactgtgttttttattcggttttcgctatcgaactgtgaaatggaaatggatggagaagagttaatgaatgatatggtccttttgttcattctcaaattaatattatttgttttttctcttatttgttgtgtgttgaatttgaaattataagagatatgcaaacattttgttttgagtaaaaatgtgtcaaatcgtggcctctaatgaccgaagttaatatgaggagtaaaacacttgtagttgtaccattatgcttattcactaggcaacaaatatattttcagacctagaaaagctgcaaatgttactgaatacaagtatgtcctcttgtgttttagacatttatgaactttcctttatgtaattttccagaatccttgtcagattctaatcattgctttataattatagttatactcatggatttgtagttgagtatgaaaatattttttaatgcattttatgacttgccaattgattgacaacatgcatcaatcgactagtcgacgagtcagtaataaacggcgtcaaagtggttgcagccggcacacacgagtcgtgtttatcaactcaaagcacaaatacttttcctcaacctaaaaataaggcaattagccaaaaacaactttgcgtgtaaacaacgctcaatacacgtgtcattttattattagctattgcttcaccgccttagctttctcgtgacctagtcgtcctcgtcttttcttcttcttcttctataaaacaatacccaaagagctcttcttcttcacaattcagatttcaatttctcaaaatcttaaaaactttctctcaattctctctaccgtgatcaaggtaaatttctgtgttccttattctctcaaaatcttcgattttgttttcgttcgatcccaatttcgtatatgttctttggtttagattctgttaatcttagatcgaagacgattttctgggtttgatcgttagatatcatcttaattctcgattagggtttcatagatatcatccgatttgttcaaataatttgagttttgtcgaataattactcttcgatttgtgatttctatctagatctggtgttagtttctagtttgtgcgatcgaatttgtagattaatctgagtttttctgattaacaccacaccaatctggtaccagaaaaggggagaagcaaaaccatgggtaaaaagcctgaactcaccgcgacgtctgtcgagaagtttctgatcgaaaagttcgacagcgtctccgacctgatgcagctctcggagggcgaagaatctcgtgctttcagcttcgatgtaggagggcgtggatatgtcctgcgggtaaatagctgcgccgatggtttctacaaagatcgttatgtttatcggcactttgcatcggccgcgctcccgattccggaagtgcttgacattggggcattcagcgagagcctgacctattgcatctcccgccgtgcacagggtgtcacgttgcaagacctgcctgaaaccgaactgcccgctgttctgcaaccggtcgcggaggcgatggatgccatcgctgcggccgatcttagccagacgagcgggttcggcccattcggaccgcaaggaatcggtcaatacactacatggcgtgatttcatatgcgcgattgctgatccccatgtgtatcactggcaaactgtgatggacgacaccgtcagtgcgtccgtcgcgcaggctctcgatgagctgatgctttgggccgaggactgccccgaagtccggcacctcgtgcacgcggatttcggctccaacaatgtcctgacggacaatggccgcataacagcggtcattgactggagcgaggcgatgttcggggattcccaatacgaggtcgccaacatcttcttctggaggccgtggttggcttgtatggagcagcagacgcgctacttcgagcggaggcatccggagcttgcaggatcgccgcggctccgggcgtatatgctccgcattggtcttgaccaactctatcagagcttggttgacggcaatttcgatgatgcagcttgggcgcagggtcgatgcgacgcaatcgtccgatccggagccgggactgtcgggcgtacacaaatcgcccgcagaagcgcggccgtctggaccgatggctgtgtagaagtactcgccgatagtggaaaccgacgccccagcactcgtccgagggcaaaggaatagatgcatcctgctttaatgagatatgcgagacgcctatgatcgcatgatatttgctttcaattctgttgtgcacgttgtaaaaaacctgagcatgtgtagctcagatccttaccgccggtttcggttcattctaatgaatatatcacccgttactatcgtatttttatgaataatattctccgttcaatttactgattgtaccctactacttatatgtacaatattaaaatgaaaacaatatattgtgctgaataggtttatagcgacatctatgatagagcgccacaataacaaacaattgcgttttattattacaaatccaattttaaaaaaagcggcagaaccggtcaaacctaaaagactgattacataaatcttattcaaatttcaaaagtgccccaggggctagtatctacgacacaccgagcggcgaactaataacgctcactgaagggaactccggttccccgccggcgcgcatgggtgagattccttgaagttgagtattggccgtccgctctaccgaaagttacgggcaccattcaacccggtccagcacggcggccgggtaaccgacttgctgccccgagaattatgcagcatttttttggtgtatgtgggccccaaatgaagtgcaggtcaaaccttgacagtgacgacaaatcgttgggcgggtccagggcgaattttgcgacaacatgtcgaggctcagcaggaccggcatgcaagctagcttactagtgatattctatagtgtcacctaaatgtattctagaccaagcatgcacagctggcgttctcagccagatccaacgttacaccacaatatatcctgccaagatctaattccggggatcggaaatccagaagcccgagaggttgccgcctttcgggctttttctttttcaaaaaaaaaaatttataaaacgatctgttgcggccggccgccgggttgtgggcaaaggcgctcgacggtgggcaaccgcttgcggttgtccacgggcggagccggtgcgcgtagcgcattgtccacaagccaagggcgaccaataattgatatatatattcataattgaaaagctaattgaacatactacttgctgtaactacttgccggagcgaggggtgtttgcaagctgttgatctgaaagggctattagcgttctcacgtgcctttttgattagcgatttcacgtgaccttattagcgatttcacgtactccgattagcgatttcacgtaccctgattagcgatttcacgtggatagtttttggagcgggccggaaagccccgtgaatcaaggctttgcggggcattagcggtttcacgtggataactaccctctatccacaggcttccggggataaaaaagcccgctcgacggcgggctgttggatggggatcgcctgaatcgccccatcatccagccagaaagtgagggagccacggttgatgagagctttgttgtaggtggaccagttggtgattttgaacttttgctttgccacggaacggtctgcgttgtcgggaagatgcgtgatctgatccttcaactcagcaaaagttcgatttattcaacaaagccacgttgtgtctcaaaatctctgatgttacattgcacaagataaaaatatatcatcatgaacaataaaactgtctgcttacataaacagtaatacaaggggtgttatgagggaagcggtgatcgccgaagtatcgactcaactatcagaggtagttggcgtcatcgagcgccatctcgaaccgacgttgctggccgtacatttgtacggctccgcagtggatggcggcctgaagccacacagtgatattgatttgctggttacggtgaccgtaaggcttgatgaaacaacgcggcgagctttgatcaacgaccttttggaaacttcggcttcccctggagagagcgagattctccgcgctgtagaagtcaccattgttgtgcacgacgacatcattccgtggcgttatccagctaagcgcgaactgcaatttggagaatggcagcgcaatgacattcttgcaggtatcttcgagccagccacgatcgacattgatctggctatcttgctgacaaaagcaagagaacatagcgttgccttggtaggtccagcggcggaggaactctttgatccggttcctgaacaggatctatttgaggcgctaaatgaaaccttaacgctatggaactcgccgcccgactgggctggcgatgagcgaaatgtagtgcttacgttgtcccgcatttggtacagcgcagtaaccggcaaaatcgcgccgaaggatgtcgctgccgactgggcaatggagcgcctgccggcccagtatcagcccgtcatacttgaagctaggcaggcttatcttggacaagaagatcgcttggcctcgcgcgcagatcagttggaagaatttgttcactacgtgaaaggcgagatcaccaaggtagtcggcaaataatcactagaccaatgttacacatatatactttagattgatttaaaacttcatttttaatttaaaaggatctaggtgaagatcctttttgataatctcatgaccaaaatcccttaacgtgagttttcgttccactgagcgtcagaccccgtagaaaagatcaaaggatcttcttgagatcctttttttctgcgcgtaatctgctgcttgcaaacaaaaaaaccaccgctaccagcggtggtttgtttgccggatcaagagctaccaactcttcttccgaaggtaactggcttcagcagagcgcagataccaaatactgttcttctagtgtagccgtagttaggccaccacttcaagaactctgtagcaccgcctacatacctcgctctgctaatcctgttaccagtggctgctgccagtggcgataagtcgtgtcttaccgggttggactcaagacgatagttaccggataaggcgcagcggtcgggctgaacggggggttcgtgcacacagcccagcttggagcgaacgacctacaccgaactgagatacctacagcgtgagctatgagaaagcgccacgcttcccgaagggagaaaggcggacaggtatccggtaagcggcagggtcggaacaggagagcgcacgagggagcttccagggggaaacgcctggtatctttatagtcctgtcgggtttcgccacctctgacttgagcgtcgatttttgtgatgctcgtcaggggggcggagcctatggaaaaacgccagcaacgcggcctttttacggttcctggccttttgctggccttttgctcacatgagatctcaaacaaacacatacagcgacttagtttacccgccaatatatcctgtcaaggctcgaactaggctcggacgaagtaagcggccgcaaccttaattaaacacggcgcgccaacagcgatcgcaccaggtacc

SEQ ID NO: 304 - DNA, 7021 bp, synthetic construct
  source 1..7021: mol_type = other DNA; note = pAGS-0034 CMV promoter+enhancer
acctgtgtaatgtattggtaatttgggaagatataataggaagcaaggctatttatccatttctgaaaaggcgaaatggcgtcaccgcgagcgtcacgcgcattccgttcttgctgtaaagcgttgtttggtacacttttgactagcgaggcttggcgtgtcagcgtatctattcaaaagtcgttaatggctgcggatcaagaaaaagttggaatagaaacagaatacccgcgaaattcaggcccggttgccatgtcctacacgccgaaataaacgaccaaattagtagaaaaataaaaactgactcggatacttacgtcacgtcttgcgcactgatttgaaaaatctcaatataaacaaagacggccacaagaaaaaaccaaaacaccgatattcattaatcttatctagtttctcaaaaaaatcataacagtattcagtcgactggtaccaacaggctatggtgagcaagggcgaggagctgttcaccggggtggtgcccatcctggtcgagctggacggcgacgtaaacggccacaagttcagcgtgtccggcgagggcgagggcgatgccacctacggcaagctgaccctgaagttcatctgcaccaccggcaagctgcccgtgccctggcccaccctcgtgaccaccctgacctacggcgtgcagtgcttcagccgctaccccgaccacatgaagcagcacgacttcttcaagtccgccatgcccgaaggctacgtccaggagcgcaccatcttcttcaaggacgacggcaactacaagacccgcgccgaggtgaagttcgagggcgacaccctggtgaaccgcatcgagctgaagggcatcgacttcaaggaggacggcaacatcctggggcacaagctggagtacaactacaacagccacaacgtctatatcatggccgacaagcagaagaacggcatcaaggtgaacttcaagatccgccacaacatcgaggacggcagcgtgcagctcgccgaccactaccagcagaacacccccatcggcgacggccccgtgctgctgcccgacaaccactacctgagcacccagtccgccctgagcaaagaccccaacgagaagcgcgatcacatggtcctgctggagttcgtgaccgccgccgggatcactctcggcatggacgagctgtacaagtcaggtggatcctagataacctttaccttcattccctgtaaattggtaccctgcaaagctttcgttcgtatcatcggtttcgacaacgttcgtcaagttcaatgcatcagtttcattgcgcacacaccagaatcctactgagtttgagtattatggcattgggaaaactgtttttcttgtaccatttgttgtgcttgtaatttactgtgttttttattcggttttcgctatcgaactgtgaaatggaaatggatggagaagagttaatgaatgatatggtccttttgttcattctcaaattaatattatttgttttttctcttatttgttgtgtgttgaatttgaaattataagagatatgcaaacattttgttttgagtaaaaatgtgtcaaatcgtggcctctaatgaccgaagttaatatgaggagtaaaacacttgtagttgtaccattatgcttattcactaggcaacaaatatattttcagacctagaaaagctgcaaatgttactgaatacaagtatgtcctcttgtgttttagacatttatgaactttcctttatgtaattttccagaatccttgtcagattctaatcattgctttataattatagttatactcatggatttgtagttgagtatgaaaatattttttaatgcattttatgacttgccaattgattgacaacatgcatcaatcgactagtcgacgagtcagtaataaacggcgtcaaagtggttgcagccggcacacacgagtcgtgtttatcaactcaaagcacaaatacttttcctcaacctaaaaataaggcaattagccaaaaacaactttgcgtgtaaacaacgctcaatacacgtgtcattttattattagctattgcttcaccgccttagctttctcgtgacctagtcgtcctcgtcttttcttcttcttcttctataaaacaatacccaaagagctcttcttcttcacaattcagatttcaatttctcaaaatcttaaaaactttctctcaattctctctaccgtgatcaaggtaaatttctgtgttccttattctctcaaaatcttcgattttgttttcgttcgatcccaatttcgtatatgttctttggtttagattctgttaatcttagatcgaagacgattttctgggtttgatcgttagatatcatcttaattctcgattagggtttcatagatatcatccgatttgttcaaataatttgagttttgtcgaataattactcttcgatttgtgatttctatctagatctggtgttagtttctagtttgtgcgatcgaatttgtagattaatctgagtttttctgattaacaccacaccaatctggtaccagaaaaggggagaagcaaaaccatgggtaaaaagcctgaactcaccgcgacgtctgtcgagaagtttctgatcgaaaagttcgacagcgtctccgacctgatgcagctctcggagggcgaagaatctcgtgctttcagcttcgatgtaggagggcgtggatatgtcctgcgggtaaatagctgcgccgatggtttctacaaagatcgttatgtttatcggcactttgcatcggccgcgctcccgattccggaagtgcttgacattggggcattcagcgagagcctgacctattgcatctcccgccgtgcacagggtgtcacgttgcaagacctgcctgaaaccgaactgcccgctgttctgcaaccggtcgcggaggcgatggatgccatcgctgcggccgatcttagccagacgagcgggttcggcccattcggaccgcaaggaatcggtcaatacactacatggcgtgatttcatatgcgcgattgctgatccccatgtgtatcactggcaaactgtgatggacgacaccgtcagtgcgtccgtcgcgcaggctctcgatgagctgatgctttgggccgaggactgccccgaagtccggcacctcgtgcacgcggatttcggctccaacaatgtcctgacggacaatggccgcataacagcggtcattgactggagcgaggcgatgttcggggattcccaatacgaggtcgccaacatcttcttctggaggccgtggttggcttgtatggagcagcagacgcgctacttcgagcggaggcatccggagcttgcaggatcgccgcggctccgggcgtatatgctccgcattggtcttgaccaactctatcagagcttggttgacggcaatttcgatgatgcagcttgggcgcagggtcgatgcgacgcaatcgtccgatccggagccgggactgtcgggcgtacacaaatcgcccgcagaagcgcggccgtctggaccgatggctgtgtagaagtactcgccgatagtggaaaccgacgccccagcactcgtccgagggcaaaggaatagatgcatcctgctttaatgagatatgcgagacgcctatgatcgcatgatatttgctttcaattctgttgtgcacgttgtaaaaaacctgagcatgtgtagctcagatccttaccgccggtttcggttcattctaatgaatatatcacccgttactatcgtatttttatgaataatattctccgttcaatttactgattgtaccctactacttatatgtacaatattaaaatgaaaacaatatattgtgctgaataggtttatagcgacatctatgatagagcgccacaataacaaacaattgcgttttattattacaaatccaattttaaaaaaagcggcagaaccggtcaaacctaaaagactgattacataaatcttattcaaatttcaaaagtgccccaggggctagtatctacgacacaccgagcggcgaactaataacgctcactgaagggaactccggttccccgccggcgcgcatgggtgagattccttgaagttgagtattggccgtccgctctaccgaaagttacgggcaccattcaacccggtccagcacggcggccgggtaaccgacttgctgccccgagaattatgcagcatttttttggtgtatgtgggccccaaatgaagtgcaggtcaaaccttgacagtgacgacaaatcgttgggcgggtccagggcgaattttgcgacaacatgtcgaggctcagcaggaccggcatgcaagctagcttactagtgatattctatagtgtcacctaaatgtattctagaccaagcatgcacagctggcgttctcagccagatccaacgttacaccacaatatatcctgccaagatctaattccggggatcggaaatccagaagcccgagaggttgccgcctttcgggctttttctttttcaaaaaaaaaaatttataaaacgatctgttgcggccggccgccgggttgtgggcaaaggcgctcgacggtgggcaaccgcttgcggttgtccacgggcggagccggtgcgcgtagcgcattgtccacaagccaagggcgaccaataattgatatatatattcataattgaaaagctaattgaacatactacttgctgtaactacttgccggagcgaggggtgtttgcaagctgttgatctgaaagggctattagcgttctcacgtgcctttttgattagcgatttcacgtgaccttattagcgatttcacgtactccgattagcgatttcacgtaccctgattagcgatttcacgtggatagtttttggagcgggccggaaagccccgtgaatcaaggctttgcggggcattagcggtttcacgtggataactaccctctatccacaggcttccggggataaaaaagcccgctcgacggcgggctgttggatggggatcgcctgaatcgccccatcatccagccagaaagtgagggagccacggttgatgagagctttgttgtaggtggaccagttggtgattttgaacttttgctttgccacggaacggtctgcgttgtcgggaagatgcgtgatctgatccttcaactcagcaaaagttcgatttattcaacaaagccacgttgtgtctcaaaatctctgatgttacattgcacaagataaaaatatatcatcatgaacaataaaactgtctgcttacataaacagtaatacaaggggtgttatgagggaagcggtgatcgccgaagtatcgactcaactatcagaggtagttggcgtcatcgagcgccatctcgaaccgacgttgctggccgtacatttgtacggctccgcagtggatggcggcctgaagccacacagtgatattgatttgctggttacggtgaccgtaaggcttgatgaaacaacgcggcgagctttgatcaacgaccttttggaaacttcggcttcccctggagagagcgagattctccgcgctgtagaagtcaccattgttgtgcacgacgacatcattccgtggcgttatccagctaagcgcgaactgcaatttggagaatggcagcgcaatgacattcttgcaggtatcttcgagccagccacgatcgacattgatctggctatcttgctgacaaaagcaagagaacatagcgttgccttggtaggtccagcggcggaggaactctttgatccggttcctgaacaggatctatttgaggcgctaaatgaaaccttaacgctatggaactcgccgcccgactgggctggcgatgagcgaaatgtagtgcttacgttgtcccgcatttggtacagcgcagtaaccggcaaaatcgcgccgaaggatgtcgctgccgactgggcaatggagcgcctgccggcccagtatcagcccgtcatacttgaagctaggcaggcttatcttggacaagaagatcgcttggcctcgcgcgcagatcagttggaagaatttgttcactacgtgaaaggcgagatcaccaaggtagtcggcaaataatcactagaccaatgttacacatatatactttagattgatttaaaacttcatttttaatttaaaaggatctaggtgaagatcctttttgataatctcatgaccaaaatcccttaacgtgagttttcgttccactgagcgtcagaccccgtagaaaagatcaaaggatcttcttgagatcctttttttctgcgcgtaatctgctgcttgcaaacaaaaaaaccaccgctaccagcggtggtttgtttgccggatcaagagctaccaactcttcttccgaaggtaactggcttcagcagagcgcagataccaaatactgttcttctagtgtagccgtagttaggccaccacttcaagaactctgtagcaccgcctacatacctcgctctgctaatcctgttaccagtggctgctgccagtggcgataagtcgtgtcttaccgggttggactcaagacgatagttaccggataaggcgcagcggtcgggctgaacggggggttcgtgcacacagcccagcttggagcgaacgacctacaccgaactgagatacctacagcgtgagctatgagaaagcgccacgcttcccgaagggagaaaggcggacaggtatccggtaagcggcagggtcggaacaggagagcgcacgagggagcttccagggggaaacgcctggtatctttatagtcctgtcgggtttcgccacctctgacttgagcgtcgatttttgtgatgctcgtcaggggggcggagcctatggaaaaacgccagcaacgcggcctttttacggttcctggccttttgctggccttttgctcacatgagatctcaaacaaacacatacagcgacttagtttacccgccaatatatcctgtcaaggctcgaactaggctcggacgaagtaagcggccgcaaccttaattaaacacggcgcgccaacagcgatcgcaccaggtacc

SEQ ID NO: 305 - DNA, 7090 bp, synthetic construct
  source 1..7090: mol_type = other DNA; note = pAGS-0035 SV40 promoter
acctgctgaggcttgacatgattggtgcgtatgtttgtatgaagctacaggactgatttggcgggctatgagggcgggggaagctctggaagggccgcgatggggcgcgcggcgtccagaaggcgccatacggcccgctggcggcacccatccggtataaaagcccgcgaccccgaacggtgacctccactttcagcgacaaacgagcacttatacatacgcgactattctgccgctatacataaccactcagctagcttaagatcccatcaagcttgcatgccgggcgcgccagaaggagcgcagccaaaccaggatgatgtttgatggggtatttgagcacttgcaacccttatccggaagccccctggcccacaaaggctaggcgccaatgcaagcagttcgcatgcagcccctggagcggtgccctcctgataaaccggccagggggcctatgttctttacttttttacaagagaagtcactcaacatcttaaaacagtattcagtcgactggtaccaacaggctatggtgagcaagggcgaggagctgttcaccggggtggtgcccatcctggtcgagctggacggcgacgtaaacggccacaagttcagcgtgtccggcgagggcgagggcgatgccacctacggcaagctgaccctgaagttcatctgcaccaccggcaagctgcccgtgccctggcccaccctcgtgaccaccctgacctacggcgtgcagtgcttcagccgctaccccgaccacatgaagcagcacgacttcttcaagtccgccatgcccgaaggctacgtccaggagcgcaccatcttcttcaaggacgacggcaactacaagacccgcgccgaggtgaagttcgagggcgacaccctggtgaaccgcatcgagctgaagggcatcgacttcaaggaggacggcaacatcctggggcacaagctggagtacaactacaacagccacaacgtctatatcatggccgacaagcagaagaacggcatcaaggtgaacttcaagatccgccacaacatcgaggacggcagcgtgcagctcgccgaccactaccagcagaacacccccatcggcgacggccccgtgctgctgcccgacaaccactacctgagcacccagtccgccctgagcaaagaccccaacgagaagcgcgatcacatggtcctgctggagttcgtgaccgccgccgggatcactctcggcatggacgagctgtacaagtcaggtggatcctagataacctttaccttcattccctgtaaattggtaccctgcaaagctttcgttcgtatcatcggtttcgacaacgttcgtcaagttcaatgcatcagtttcattgcgcacacaccagaatcctactgagtttgagtattatggcattgggaaaactgtttttcttgtaccatttgttgtgcttgtaatttactgtgttttttattcggttttcgctatcgaactgtgaaatggaaatggatggagaagagttaatgaatgatatggtccttttgttcattctcaaattaatattatttgttttttctcttatttgttgtgtgttgaatttgaaattataagagatatgcaaacattttgttttgagtaaaaatgtgtcaaatcgtggcctctaatgaccgaagttaatatgaggagtaaaacacttgtagttgtaccattatgcttattcactaggcaacaaatatattttcagacctagaaaagctgcaaatgttactgaatacaagtatgtcctcttgtgttttagacatttatgaactttcctttatgtaattttccagaatccttgtcagattctaatcattgctttataattatagttatactcatggatttgtagttgagtatgaaaatattttttaatgcattttatgacttgccaattgattgacaacatgcatcaatcgactagtcgacgagtcagtaataaacggcgtcaaagtggttgcagccggcacacacgagtcgtgtttatcaactcaaagcacaaatacttttcctcaacctaaaaataaggcaattagccaaaaacaactttgcgtgtaaacaacgctcaatacacgtgtcattttattattagctattgcttcaccgccttagctttctcgtgacctagtcgtcctcgtcttttcttcttcttcttctataaaacaatacccaaagagctcttcttcttcacaattcagatttcaatttctcaaaatcttaaaaactttctctcaattctctctaccgtgatcaaggtaaatttctgtgttccttattctctcaaaatcttcgattttgttttcgttcgatcccaatttcgtatatgttctttggtttagattctgttaatcttagatcgaagacgattttctgggtttgatcgttagatatcatcttaattctcgattagggtttcatagatatcatccgatttgttcaaataatttgagttttgtcgaataattactcttcgatttgtgatttctatctagatctggtgttagtttctagtttgtgcgatcgaatttgtagattaatctgagtttttctgattaacaccacaccaatctggtaccagaaaaggggagaagcaaaaccatgggtaaaaagcctgaactcaccgcgacgtctgtcgagaagtttctgatcgaaaagttcgacagcgtctccgacctgatgcagctctcggagggcgaagaatctcgtgctttcagcttcgatgtaggagggcgtggatatgtcctgcgggtaaatagctgcgccgatggtttctacaaagatcgttatgtttatcggcactttgcatcggccgcgctcccgattccggaagtgcttgacattggggcattcagcgagagcctgacctattgcatctcccgccgtgcacagggtgtcacgttgcaagacctgcctgaaaccgaactgcccgctgttctgcaaccggtcgcggaggcgatggatgccatcgctgcggccgatcttagccagacgagcgggttcggcccattcggaccgcaaggaatcggtcaatacactacatggcgtgatttcatatgcgcgattgctgatccccatgtgtatcactggcaaactgtgatggacgacaccgtcagtgcgtccgtcgcgcaggctctcgatgagctgatgctttgggccgaggactgccccgaagtccggcacctcgtgcacgcggatttcggctccaacaatgtcctgacggacaatggccgcataacagcggtcattgactggagcgaggcgatgttcggggattcccaatacgaggtcgccaacatcttcttctggaggccgtggttggcttgtatggagcagcagacgcgctacttcgagcggaggcatccggagcttgcaggatcgccgcggctccgggcgtatatgctccgcattggtcttgaccaactctatcagagcttggttgacggcaatttcgatgatgcagcttgggcgcagggtcgatgcgacgcaatcgtccgatccggagccgggactgtcgggcgtacacaaatcgcccgcagaagcgcggccgtctggaccgatggctgtgtagaagtactcgccgatagtggaaaccgacgccccagcactcgtccgagggcaaaggaatagatgcatcctgctttaatgagatatgcgagacgcctatgatcgcatgatatttgctttcaattctgttgtgcacgttgtaaaaaacctgagcatgtgtagctcagatccttaccgccggtttcggttcattctaatgaatatatcacccgttactatcgtatttttatgaataatattctccgttcaatttactgattgtaccctactacttatatgtacaatattaaaatgaaaacaatatattgtgctgaataggtttatagcgacatctatgatagagcgccacaataacaaacaattgcgttttattattacaaatccaattttaaaaaaagcggcagaaccggtcaaacctaaaagactgattacataaatcttattcaaatttcaaaagtgccccaggggctagtatctacgacacaccgagcggcgaactaataacgctcactgaagggaactccggttccccgccggcgcgcatgggtgagattccttgaagttgagtattggccgtccgctctaccgaaagttacgggcaccattcaacccggtccagcacggcggccgggtaaccgacttgctgccccgagaattatgcagcatttttttggtgtatgtgggccccaaatgaagtgcaggtcaaaccttgacagtgacgacaaatcgttgggcgggtccagggcgaattttgcgacaacatgtcgaggctcagcaggaccggcatgcaagctagcttactagtgatattctatagtgtcacctaaatgtattctagaccaagcatgcacagctggcgttctcagccagatccaacgttacaccacaatatatcctgccaagatctaattccggggatcggaaatccagaagcccgagaggttgccgcctttcgggctttttctttttcaaaaaaaaaaatttataaaacgatctgttgcggccggccgccgggttgtgggcaaaggcgctcgacggtgggcaaccgcttgcggttgtccacgggcggagccggtgcgcgtagcgcattgtccacaagccaagggcgaccaataattgatatatatattcataattgaaaagctaattgaacatactacttgctgtaactacttgccggagcgaggggtgtttgcaagctgttgatctgaaagggctattagcgttctcacgtgcctttttgattagcgatttcacgtgaccttattagcgatttcacgtactccgattagcgatttcacgtaccctgattagcgatttcacgtggatagtttttggagcgggccggaaagccccgtgaatcaaggctttgcggggcattagcggtttcacgtggataactaccctctatccacaggcttccggggataaaaaagcccgctcgacggcgggctgttggatggggatcgcctgaatcgccccatcatccagccagaaagtgagggagccacggttgatgagagctttgttgtaggtggaccagttggtgattttgaacttttgctttgccacggaacggtctgcgttgtcgggaagatgcgtgatctgatccttcaactcagcaaaagttcgatttattcaacaaagccacgttgtgtctcaaaatctctgatgttacattgcacaagataaaaatatatcatcatgaacaataaaactgtctgcttacataaacagtaatacaaggggtgttatgagggaagcggtgatcgccgaagtatcgactcaactatcagaggtagttggcgtcatcgagcgccatctcgaaccgacgttgctggccgtacatttgtacggctccgcagtggatggcggcctgaagccacacagtgatattgatttgctggttacggtgaccgtaaggcttgatgaaacaacgcggcgagctttgatcaacgaccttttggaaacttcggcttcccctggagagagcgagattctccgcgctgtagaagtcaccattgttgtgcacgacgacatcattccgtggcgttatccagctaagcgcgaactgcaatttggagaatggcagcgcaatgacattcttgcaggtatcttcgagccagccacgatcgacattgatctggctatcttgctgacaaaagcaagagaacatagcgttgccttggtaggtccagcggcggaggaactctttgatccggttcctgaacaggatctatttgaggcgctaaatgaaaccttaacgctatggaactcgccgcccgactgggctggcgatgagcgaaatgtagtgcttacgttgtcccgcatttggtacagcgcagtaaccggcaaaatcgcgccgaaggatgtcgctgccgactgggcaatggagcgcctgccggcccagtatcagcccgtcatacttgaagctaggcaggcttatcttggacaagaagatcgcttggcctcgcgcgcagatcagttggaagaatttgttcactacgtgaaaggcgagatcaccaaggtagtcggcaaataatcactagaccaatgttacacatatatactttagattgatttaaaacttcatttttaatttaaaaggatctaggtgaagatcctttttgataatctcatgaccaaaatcccttaacgtgagttttcgttccactgagcgtcagaccccgtagaaaagatcaaaggatcttcttgagatcctttttttctgcgcgtaatctgctgcttgcaaacaaaaaaaccaccgctaccagcggtggtttgtttgccggatcaagagctaccaactcttcttccgaaggtaactggcttcagcagagcgcagataccaaatactgttcttctagtgtagccgtagttaggccaccacttcaagaactctgtagcaccgcctacatacctcgctctgctaatcctgttaccagtggctgctgccagtggcgataagtcgtgtcttaccgggttggactcaagacgatagttaccggataaggcgcagcggtcgggctgaacggggggttcgtgcacacagcccagcttggagcgaacgacctacaccgaactgagatacctacagcgtgagctatgagaaagcgccacgcttcccgaagggagaaaggcggacaggtatccggtaagcggcagggtcggaacaggagagcgcacgagggagcttccagggggaaacgcctggtatctttatagtcctgtcgggtttcgccacctctgacttgagcgtcgatttttgtgatgctcgtcaggggggcggagcctatggaaaaacgccagcaacgcggcctttttacggttcctggccttttgctggccttttgctcacatgagatctcaaacaaacacatacagcgacttagtttacccgccaatatatcctgtcaaggctcgaactaggctcggacgaagtaagcggccgcaaccttaattaaacacggcgcgccaacagcgatcgcaccaggtacc

SEQ ID NO: 306 - DNA, 7418 bp, synthetic construct
  source 1..7418: mol_type = other DNA; note = pAGS-0036 SV40 promoter+ enchancer
acctgatcccacacacctgcccgtctgcctgacaggaagtgaacgcatgtcgagggaggcctcaccaatcgtcacacgagccctcgtcagaaacacgtctccgccacgctctccctctcactgccgaccccgcagcccttttgccctttcctaggccaccgacaggacccaggcgctctcagcatgcctcaacaacccgtactcgtgccagcggtgcccttgtgctggtgatcgcttggaagcgcatgcgaagacgaaggggcggagcaggcggcctggctgttcgaagggctcgccgccagttcgggtgcctttctccacgcgcgcctccacacctaccgatgcgtgaaggcaggcaaatgctcatgtttgcccgaactcggagtccttaaaaagccgcttcttgtcgtcgttccgagacatgttagcagatcgcagtgccacctttcctgacgcgctcggccccatattcggacgcaattgtcatttgtagcacaattggagcaaatctggcgaggcagtaggcttttaagttgcaaggcgagagagcaaagtgggacgcggcgtgattattggtatttacgcgacggcccggcgcgttagcggcccttcccccaggccagggacgattatgtatcaatattgttgcgttcgggcactcgtgcgagggctcctgcgggctggggagggggatctgggaattggaggtacgaccgagatggcttgctcggggggaggtttcctcgccgagcaagccagggttaggtgttgcgctcttgactcgttgtgcattctaggaccccactgctactcacaacaagccaaaacagtattcagtcgactggtaccaacaggctatggtgagcaagggcgaggagctgttcaccggggtggtgcccatcctggtcgagctggacggcgacgtaaacggccacaagttcagcgtgtccggcgagggcgagggcgatgccacctacggcaagctgaccctgaagttcatctgcaccaccggcaagctgcccgtgccctggcccaccctcgtgaccaccctgacctacggcgtgcagtgcttcagccgctaccccgaccacatgaagcagcacgacttcttcaagtccgccatgcccgaaggctacgtccaggagcgcaccatcttcttcaaggacgacggcaactacaagacccgcgccgaggtgaagttcgagggcgacaccctggtgaaccgcatcgagctgaagggcatcgacttcaaggaggacggcaacatcctggggcacaagctggagtacaactacaacagccacaacgtctatatcatggccgacaagcagaagaacggcatcaaggtgaacttcaagatccgccacaacatcgaggacggcagcgtgcagctcgccgaccactaccagcagaacacccccatcggcgacggccccgtgctgctgcccgacaaccactacctgagcacccagtccgccctgagcaaagaccccaacgagaagcgcgatcacatggtcctgctggagttcgtgaccgccgccgggatcactctcggcatggacgagctgtacaagtcaggtggatcctagataacctttaccttcattccctgtaaattggtaccctgcaaagctttcgttcgtatcatcggtttcgacaacgttcgtcaagttcaatgcatcagtttcattgcgcacacaccagaatcctactgagtttgagtattatggcattgggaaaactgtttttcttgtaccatttgttgtgcttgtaatttactgtgttttttattcggttttcgctatcgaactgtgaaatggaaatggatggagaagagttaatgaatgatatggtccttttgttcattctcaaattaatattatttgttttttctcttatttgttgtgtgttgaatttgaaattataagagatatgcaaacattttgttttgagtaaaaatgtgtcaaatcgtggcctctaatgaccgaagttaatatgaggagtaaaacacttgtagttgtaccattatgcttattcactaggcaacaaatatattttcagacctagaaaagctgcaaatgttactgaatacaagtatgtcctcttgtgttttagacatttatgaactttcctttatgtaattttccagaatccttgtcagattctaatcattgctttataattatagttatactcatggatttgtagttgagtatgaaaatattttttaatgcattttatgacttgccaattgattgacaacatgcatcaatcgactagtcgacgagtcagtaataaacggcgtcaaagtggttgcagccggcacacacgagtcgtgtttatcaactcaaagcacaaatacttttcctcaacctaaaaataaggcaattagccaaaaacaactttgcgtgtaaacaacgctcaatacacgtgtcattttattattagctattgcttcaccgccttagctttctcgtgacctagtcgtcctcgtcttttcttcttcttcttctataaaacaatacccaaagagctcttcttcttcacaattcagatttcaatttctcaaaatcttaaaaactttctctcaattctctctaccgtgatcaaggtaaatttctgtgttccttattctctcaaaatcttcgattttgttttcgttcgatcccaatttcgtatatgttctttggtttagattctgttaatcttagatcgaagacgattttctgggtttgatcgttagatatcatcttaattctcgattagggtttcatagatatcatccgatttgttcaaataatttgagttttgtcgaataattactcttcgatttgtgatttctatctagatctggtgttagtttctagtttgtgcgatcgaatttgtagattaatctgagtttttctgattaacaccacaccaatctggtaccagaaaaggggagaagcaaaaccatgggtaaaaagcctgaactcaccgcgacgtctgtcgagaagtttctgatcgaaaagttcgacagcgtctccgacctgatgcagctctcggagggcgaagaatctcgtgctttcagcttcgatgtaggagggcgtggatatgtcctgcgggtaaatagctgcgccgatggtttctacaaagatcgttatgtttatcggcactttgcatcggccgcgctcccgattccggaagtgcttgacattggggcattcagcgagagcctgacctattgcatctcccgccgtgcacagggtgtcacgttgcaagacctgcctgaaaccgaactgcccgctgttctgcaaccggtcgcggaggcgatggatgccatcgctgcggccgatcttagccagacgagcgggttcggcccattcggaccgcaaggaatcggtcaatacactacatggcgtgatttcatatgcgcgattgctgatccccatgtgtatcactggcaaactgtgatggacgacaccgtcagtgcgtccgtcgcgcaggctctcgatgagctgatgctttgggccgaggactgccccgaagtccggcacctcgtgcacgcggatttcggctccaacaatgtcctgacggacaatggccgcataacagcggtcattgactggagcgaggcgatgttcggggattcccaatacgaggtcgccaacatcttcttctggaggccgtggttggcttgtatggagcagcagacgcgctacttcgagcggaggcatccggagcttgcaggatcgccgcggctccgggcgtatatgctccgcattggtcttgaccaactctatcagagcttggttgacggcaatttcgatgatgcagcttgggcgcagggtcgatgcgacgcaatcgtccgatccggagccgggactgtcgggcgtacacaaatcgcccgcagaagcgcggccgtctggaccgatggctgtgtagaagtactcgccgatagtggaaaccgacgccccagcactcgtccgagggcaaaggaatagatgcatcctgctttaatgagatatgcgagacgcctatgatcgcatgatatttgctttcaattctgttgtgcacgttgtaaaaaacctgagcatgtgtagctcagatccttaccgccggtttcggttcattctaatgaatatatcacccgttactatcgtatttttatgaataatattctccgttcaatttactgattgtaccctactacttatatgtacaatattaaaatgaaaacaatatattgtgctgaataggtttatagcgacatctatgatagagcgccacaataacaaacaattgcgttttattattacaaatccaattttaaaaaaagcggcagaaccggtcaaacctaaaagactgattacataaatcttattcaaatttcaaaagtgccccaggggctagtatctacgacacaccgagcggcgaactaataacgctcactgaagggaactccggttccccgccggcgcgcatgggtgagattccttgaagttgagtattggccgtccgctctaccgaaagttacgggcaccattcaacccggtccagcacggcggccgggtaaccgacttgctgccccgagaattatgcagcatttttttggtgtatgtgggccccaaatgaagtgcaggtcaaaccttgacagtgacgacaaatcgttgggcgggtccagggcgaattttgcgacaacatgtcgaggctcagcaggaccggcatgcaagctagcttactagtgatattctatagtgtcacctaaatgtattctagaccaagcatgcacagctggcgttctcagccagatccaacgttacaccacaatatatcctgccaagatctaattccggggatcggaaatccagaagcccgagaggttgccgcctttcgggctttttctttttcaaaaaaaaaaatttataaaacgatctgttgcggccggccgccgggttgtgggcaaaggcgctcgacggtgggcaaccgcttgcggttgtccacgggcggagccggtgcgcgtagcgcattgtccacaagccaagggcgaccaataattgatatatatattcataattgaaaagctaattgaacatactacttgctgtaactacttgccggagcgaggggtgtttgcaagctgttgatctgaaagggctattagcgttctcacgtgcctttttgattagcgatttcacgtgaccttattagcgatttcacgtactccgattagcgatttcacgtaccctgattagcgatttcacgtggatagtttttggagcgggccggaaagccccgtgaatcaaggctttgcggggcattagcggtttcacgtggataactaccctctatccacaggcttccggggataaaaaagcccgctcgacggcgggctgttggatggggatcgcctgaatcgccccatcatccagccagaaagtgagggagccacggttgatgagagctttgttgtaggtggaccagttggtgattttgaacttttgctttgccacggaacggtctgcgttgtcgggaagatgcgtgatctgatccttcaactcagcaaaagttcgatttattcaacaaagccacgttgtgtctcaaaatctctgatgttacattgcacaagataaaaatatatcatcatgaacaataaaactgtctgcttacataaacagtaatacaaggggtgttatgagggaagcggtgatcgccgaagtatcgactcaactatcagaggtagttggcgtcatcgagcgccatctcgaaccgacgttgctggccgtacatttgtacggctccgcagtggatggcggcctgaagccacacagtgatattgatttgctggttacggtgaccgtaaggcttgatgaaacaacgcggcgagctttgatcaacgaccttttggaaacttcggcttcccctggagagagcgagattctccgcgctgtagaagtcaccattgttgtgcacgacgacatcattccgtggcgttatccagctaagcgcgaactgcaatttggagaatggcagcgcaatgacattcttgcaggtatcttcgagccagccacgatcgacattgatctggctatcttgctgacaaaagcaagagaacatagcgttgccttggtaggtccagcggcggaggaactctttgatccggttcctgaacaggatctatttgaggcgctaaatgaaaccttaacgctatggaactcgccgcccgactgggctggcgatgagcgaaatgtagtgcttacgttgtcccgcatttggtacagcgcagtaaccggcaaaatcgcgccgaaggatgtcgctgccgactgggcaatggagcgcctgccggcccagtatcagcccgtcatacttgaagctaggcaggcttatcttggacaagaagatcgcttggcctcgcgcgcagatcagttggaagaatttgttcactacgtgaaaggcgagatcaccaaggtagtcggcaaataatcactagaccaatgttacacatatatactttagattgatttaaaacttcatttttaatttaaaaggatctaggtgaagatcctttttgataatctcatgaccaaaatcccttaacgtgagttttcgttccactgagcgtcagaccccgtagaaaagatcaaaggatcttcttgagatcctttttttctgcgcgtaatctgctgcttgcaaacaaaaaaaccaccgctaccagcggtggtttgtttgccggatcaagagctaccaactcttcttccgaaggtaactggcttcagcagagcgcagataccaaatactgttcttctagtgtagccgtagttaggccaccacttcaagaactctgtagcaccgcctacatacctcgctctgctaatcctgttaccagtggctgctgccagtggcgataagtcgtgtcttaccgggttggactcaagacgatagttaccggataaggcgcagcggtcgggctgaacggggggttcgtgcacacagcccagcttggagcgaacgacctacaccgaactgagatacctacagcgtgagctatgagaaagcgccacgcttcccgaagggagaaaggcggacaggtatccggtaagcggcagggtcggaacaggagagcgcacgagggagcttccagggggaaacgcctggtatctttatagtcctgtcgggtttcgccacctctgacttgagcgtcgatttttgtgatgctcgtcaggggggcggagcctatggaaaaacgccagcaacgcggcctttttacggttcctggccttttgctggccttttgctcacatgagatctcaaacaaacacatacagcgacttagtttacccgccaatatatcctgtcaaggctcgaactaggctcggacgaagtaagcggccgcaaccttaattaaacacggcgcgccaacagcgatcgcaccaggtacc

SEQ ID NO: 307 - DNA, 7734 bp, synthetic construct
  source 1..7734: mol_type = other DNA; note = pAGS-0037 EF2 promoter
acctgtgatgcggttttggcagtacatcaatgggcgtggatagcggtttgactcacggggatttccaagtctccaccccattgacgtcaatgggagtttgttttggcaccaaaatcaacgggactttccaaaatgtcgtaacaactccgccccattgacgcaaatgggcggtaggcgtgtacggtgggaggtctatataagcagagctaacagtattcagtcgactggtaccaacaggctatggaagacgccaaaaacataaagaaaggcccggcgccattctatccgctggaagatggaaccgctggagagcaactgcataaggctatgaagagatacgccctggttcctggaacaattgcttttacagatgcacatatcgaggtggacatcacttacgctgagtacttcgaaatgtccgttcggttggcagaagctatgaaacgatatgggctgaatacaaatcacagaatcgtcgtatgcagtgaaaactctcttcaattctttatgccggtgttgggcgcgttatttatcggagttgcagttgcgcccgcgaacgacatttataatgaacgtgaattgctcaacagtatgggcatttcgcagcctaccgtggtgttcgtttccaaaaaggggttgcaaaaaattttgaacgtgcaaaaaaagctcccaatcatccaaaaaattattatcatggattctaaaacggattaccagggatttcagtcgatgtacacgttcgtcacatctcatctacctcccggttttaatgaatacgattttgtgccagagtccttcgatagggacaagacaattgcactgatcatgaactcctctggatctactggtctgcctaaaggtgtcgctctgcctcatagaactgcctgcgtgagattctcgcatgccagagatcctatttttggcaatcaaatcattccggatactgcgattttaagtgttgttccattccatcacggttttggaatgtttactacactcggatatttgatatgtggatttcgagtcgtcttaatgtatagatttgaagaagagctgtttctgaggagccttcaggattacaagattcaaagtgcgctgctggtgccaaccctattctccttcttcgccaaaagcactctgattgacaaatacgatttatctaatttacacgaaattgcttctggtggcgctcccctctctaaggaagtcggggaagcggttgccaagaggttccatctgccaggtatcaggcaaggatatgggctcactgagactacatcagctattctgattacacccgagggggatgataaaccgggcgcggtcggtaaagttgttccattttttgaagcgaaggttgtggatctggataccgggaaaacgctgggcgttaatcaaagaggcgaactgtgtgtgagaggtcctatgattatgtccggttatgtaaacaatccggaagcgaccaacgccttgattgacaaggatggatggctacattctggagacatagcttactgggacgaagacgaacacttcttcatcgttgaccgcctgaagtctctgattaagtacaaaggctatcaggtggctcccgctgaattggaatccatcttgctccaacaccccaacatcttcgacgcaggtgtcgcaggtcttcccgacgatgacgccggtgaacttcccgccgccgttgttgttttggagcacggaaagacgatgacggaaaaagagatcgtggattacgtcgccagtcaagtaacaaccgcgaaaaagttgcgcggaggagttgtgtttgtggacgaagtaccgaaaggtcttaccggaaaactcgacgcaagaaaaatcagagagatcctcataaaggccaagaagggcggaaagatcgccgtgtcaggtggatcctagataacctttaccttcattccctgtaaattggtaccctgcaaagctttcgttcgtatcatcggtttcgacaacgttcgtcaagttcaatgcatcagtttcattgcgcacacaccagaatcctactgagtttgagtattatggcattgggaaaactgtttttcttgtaccatttgttgtgcttgtaatttactgtgttttttattcggttttcgctatcgaactgtgaaatggaaatggatggagaagagttaatgaatgatatggtccttttgttcattctcaaattaatattatttgttttttctcttatttgttgtgtgttgaatttgaaattataagagatatgcaaacattttgttttgagtaaaaatgtgtcaaatcgtggcctctaatgaccgaagttaatatgaggagtaaaacacttgtagttgtaccattatgcttattcactaggcaacaaatatattttcagacctagaaaagctgcaaatgttactgaatacaagtatgtcctcttgtgttttagacatttatgaactttcctttatgtaattttccagaatccttgtcagattctaatcattgctttataattatagttatactcatggatttgtagttgagtatgaaaatattttttaatgcattttatgacttgccaattgattgacaacatgcatcaatcgactagtcgacgagtcagtaataaacggcgtcaaagtggttgcagccggcacacacgagtcgtgtttatcaactcaaagcacaaatacttttcctcaacctaaaaataaggcaattagccaaaaacaactttgcgtgtaaacaacgctcaatacacgtgtcattttattattagctattgcttcaccgccttagctttctcgtgacctagtcgtcctcgtcttttcttcttcttcttctataaaacaatacccaaagagctcttcttcttcacaattcagatttcaatttctcaaaatcttaaaaactttctctcaattctctctaccgtgatcaaggtaaatttctgtgttccttattctctcaaaatcttcgattttgttttcgttcgatcccaatttcgtatatgttctttggtttagattctgttaatcttagatcgaagacgattttctgggtttgatcgttagatatcatcttaattctcgattagggtttcatagatatcatccgatttgttcaaataatttgagttttgtcgaataattactcttcgatttgtgatttctatctagatctggtgttagtttctagtttgtgcgatcgaatttgtagattaatctgagtttttctgattaacaccacaccaatctggtaccagaaaaggggagaagcaaaaccatgggtaaaaagcctgaactcaccgcgacgtctgtcgagaagtttctgatcgaaaagttcgacagcgtctccgacctgatgcagctctcggagggcgaagaatctcgtgctttcagcttcgatgtaggagggcgtggatatgtcctgcgggtaaatagctgcgccgatggtttctacaaagatcgttatgtttatcggcactttgcatcggccgcgctcccgattccggaagtgcttgacattggggcattcagcgagagcctgacctattgcatctcccgccgtgcacagggtgtcacgttgcaagacctgcctgaaaccgaactgcccgctgttctgcaaccggtcgcggaggcgatggatgccatcgctgcggccgatcttagccagacgagcgggttcggcccattcggaccgcaaggaatcggtcaatacactacatggcgtgatttcatatgcgcgattgctgatccccatgtgtatcactggcaaactgtgatggacgacaccgtcagtgcgtccgtcgcgcaggctctcgatgagctgatgctttgggccgaggactgccccgaagtccggcacctcgtgcacgcggatttcggctccaacaatgtcctgacggacaatggccgcataacagcggtcattgactggagcgaggcgatgttcggggattcccaatacgaggtcgccaacatcttcttctggaggccgtggttggcttgtatggagcagcagacgcgctacttcgagcggaggcatccggagcttgcaggatcgccgcggctccgggcgtatatgctccgcattggtcttgaccaactctatcagagcttggttgacggcaatttcgatgatgcagcttgggcgcagggtcgatgcgacgcaatcgtccgatccggagccgggactgtcgggcgtacacaaatcgcccgcagaagcgcggccgtctggaccgatggctgtgtagaagtactcgccgatagtggaaaccgacgccccagcactcgtccgagggcaaaggaatagatgcatcctgctttaatgagatatgcgagacgcctatgatcgcatgatatttgctttcaattctgttgtgcacgttgtaaaaaacctgagcatgtgtagctcagatccttaccgccggtttcggttcattctaatgaatatatcacccgttactatcgtatttttatgaataatattctccgttcaatttactgattgtaccctactacttatatgtacaatattaaaatgaaaacaatatattgtgctgaataggtttatagcgacatctatgatagagcgccacaataacaaacaattgcgttttattattacaaatccaattttaaaaaaagcggcagaaccggtcaaacctaaaagactgattacataaatcttattcaaatttcaaaagtgccccaggggctagtatctacgacacaccgagcggcgaactaataacgctcactgaagggaactccggttccccgccggcgcgcatgggtgagattccttgaagttgagtattggccgtccgctctaccgaaagttacgggcaccattcaacccggtccagcacggcggccgggtaaccgacttgctgccccgagaattatgcagcatttttttggtgtatgtgggccccaaatgaagtgcaggtcaaaccttgacagtgacgacaaatcgttgggcgggtccagggcgaattttgcgacaacatgtcgaggctcagcaggaccggcatgcaagctagcttactagtgatattctatagtgtcacctaaatgtattctagaccaagcatgcacagctggcgttctcagccagatccaacgttacaccacaatatatcctgccaagatctaattccggggatcggaaatccagaagcccgagaggttgccgcctttcgggctttttctttttcaaaaaaaaaaatttataaaacgatctgttgcggccggccgccgggttgtgggcaaaggcgctcgacggtgggcaaccgcttgcggttgtccacgggcggagccggtgcgcgtagcgcattgtccacaagccaagggcgaccaataattgatatatatattcataattgaaaagctaattgaacatactacttgctgtaactacttgccggagcgaggggtgtttgcaagctgttgatctgaaagggctattagcgttctcacgtgcctttttgattagcgatttcacgtgaccttattagcgatttcacgtactccgattagcgatttcacgtaccctgattagcgatttcacgtggatagtttttggagcgggccggaaagccccgtgaatcaaggctttgcggggcattagcggtttcacgtggataactaccctctatccacaggcttccggggataaaaaagcccgctcgacggcgggctgttggatggggatcgcctgaatcgccccatcatccagccagaaagtgagggagccacggttgatgagagctttgttgtaggtggaccagttggtgattttgaacttttgctttgccacggaacggtctgcgttgtcgggaagatgcgtgatctgatccttcaactcagcaaaagttcgatttattcaacaaagccacgttgtgtctcaaaatctctgatgttacattgcacaagataaaaatatatcatcatgaacaataaaactgtctgcttacataaacagtaatacaaggggtgttatgagggaagcggtgatcgccgaagtatcgactcaactatcagaggtagttggcgtcatcgagcgccatctcgaaccgacgttgctggccgtacatttgtacggctccgcagtggatggcggcctgaagccacacagtgatattgatttgctggttacggtgaccgtaaggcttgatgaaacaacgcggcgagctttgatcaacgaccttttggaaacttcggcttcccctggagagagcgagattctccgcgctgtagaagtcaccattgttgtgcacgacgacatcattccgtggcgttatccagctaagcgcgaactgcaatttggagaatggcagcgcaatgacattcttgcaggtatcttcgagccagccacgatcgacattgatctggctatcttgctgacaaaagcaagagaacatagcgttgccttggtaggtccagcggcggaggaactctttgatccggttcctgaacaggatctatttgaggcgctaaatgaaaccttaacgctatggaactcgccgcccgactgggctggcgatgagcgaaatgtagtgcttacgttgtcccgcatttggtacagcgcagtaaccggcaaaatcgcgccgaaggatgtcgctgccgactgggcaatggagcgcctgccggcccagtatcagcccgtcatacttgaagctaggcaggcttatcttggacaagaagatcgcttggcctcgcgcgcagatcagttggaagaatttgttcactacgtgaaaggcgagatcaccaaggtagtcggcaaataatcactagaccaatgttacacatatatactttagattgatttaaaacttcatttttaatttaaaaggatctaggtgaagatcctttttgataatctcatgaccaaaatcccttaacgtgagttttcgttccactgagcgtcagaccccgtagaaaagatcaaaggatcttcttgagatcctttttttctgcgcgtaatctgctgcttgcaaacaaaaaaaccaccgctaccagcggtggtttgtttgccggatcaagagctaccaactcttcttccgaaggtaactggcttcagcagagcgcagataccaaatactgttcttctagtgtagccgtagttaggccaccacttcaagaactctgtagcaccgcctacatacctcgctctgctaatcctgttaccagtggctgctgccagtggcgataagtcgtgtcttaccgggttggactcaagacgatagttaccggataaggcgcagcggtcgggctgaacggggggttcgtgcacacagcccagcttggagcgaacgacctacaccgaactgagatacctacagcgtgagctatgagaaagcgccacgcttcccgaagggagaaaggcggacaggtatccggtaagcggcagggtcggaacaggagagcgcacgagggagcttccagggggaaacgcctggtatctttatagtcctgtcgggtttcgccacctctgacttgagcgtcgatttttgtgatgctcgtcaggggggcggagcctatggaaaaacgccagcaacgcggcctttttacggttcctggccttttgctggccttttgctcacatgagatctcaaacaaacacatacagcgacttagtttacccgccaatatatcctgtcaaggctcgaactaggctcggacgaagtaagcggccgcaaccttaattaaacacggcgcgccaacagcgatcgcaccaggtacc

SEQ ID NO: 308 - DNA, 8038 bp, synthetic construct
  source 1..8038: mol_type = other DNA; note = pAGS-0038 Histone 4 promoter
acctcgttacataacttacggtaaatggcccgcctggctgaccgcccaacgacccccgcccattgacgtcaataatgacgtatgttcccatagtaacgccaatagggactttccattgacgtcaatgggtggagtatttacggtaaactgcccacttggcagtacatcaagtgtatcatatgccaagtacgccccctattgacgtcaatgacggtaaatggcccgcctggcattatgcccagtacatgaccttatgggactttcctacttggcagtacatctacgtattagtcatcgctattaccatggtgatgcggttttggcagtacatcaatgggcgtggatagcggtttgactcacggggatttccaagtctccaccccattgacgtcaatgggagtttgttttggcaccaaaatcaacgggactttccaaaatgtcgtaacaactccgccccattgacgcaaatgggcggtaggcgtgtacggtgggaggtctatataagcagagctaacagtattcagtcgactggtaccaacaggctatggaagacgccaaaaacataaagaaaggcccggcgccattctatccgctggaagatggaaccgctggagagcaactgcataaggctatgaagagatacgccctggttcctggaacaattgcttttacagatgcacatatcgaggtggacatcacttacgctgagtacttcgaaatgtccgttcggttggcagaagctatgaaacgatatgggctgaatacaaatcacagaatcgtcgtatgcagtgaaaactctcttcaattctttatgccggtgttgggcgcgttatttatcggagttgcagttgcgcccgcgaacgacatttataatgaacgtgaattgctcaacagtatgggcatttcgcagcctaccgtggtgttcgtttccaaaaaggggttgcaaaaaattttgaacgtgcaaaaaaagctcccaatcatccaaaaaattattatcatggattctaaaacggattaccagggatttcagtcgatgtacacgttcgtcacatctcatctacctcccggttttaatgaatacgattttgtgccagagtccttcgatagggacaagacaattgcactgatcatgaactcctctggatctactggtctgcctaaaggtgtcgctctgcctcatagaactgcctgcgtgagattctcgcatgccagagatcctatttttggcaatcaaatcattccggatactgcgattttaagtgttgttccattccatcacggttttggaatgtttactacactcggatatttgatatgtggatttcgagtcgtcttaatgtatagatttgaagaagagctgtttctgaggagccttcaggattacaagattcaaagtgcgctgctggtgccaaccctattctccttcttcgccaaaagcactctgattgacaaatacgatttatctaatttacacgaaattgcttctggtggcgctcccctctctaaggaagtcggggaagcggttgccaagaggttccatctgccaggtatcaggcaaggatatgggctcactgagactacatcagctattctgattacacccgagggggatgataaaccgggcgcggtcggtaaagttgttccattttttgaagcgaaggttgtggatctggataccgggaaaacgctgggcgttaatcaaagaggcgaactgtgtgtgagaggtcctatgattatgtccggttatgtaaacaatccggaagcgaccaacgccttgattgacaaggatggatggctacattctggagacatagcttactgggacgaagacgaacacttcttcatcgttgaccgcctgaagtctctgattaagtacaaaggctatcaggtggctcccgctgaattggaatccatcttgctccaacaccccaacatcttcgacgcaggtgtcgcaggtcttcccgacgatgacgccggtgaacttcccgccgccgttgttgttttggagcacggaaagacgatgacggaaaaagagatcgtggattacgtcgccagtcaagtaacaaccgcgaaaaagttgcgcggaggagttgtgtttgtggacgaagtaccgaaaggtcttaccggaaaactcgacgcaagaaaaatcagagagatcctcataaaggccaagaagggcggaaagatcgccgtgtcaggtggatcctagataacctttaccttcattccctgtaaattggtaccctgcaaagctttcgttcgtatcatcggtttcgacaacgttcgtcaagttcaatgcatcagtttcattgcgcacacaccagaatcctactgagtttgagtattatggcattgggaaaactgtttttcttgtaccatttgttgtgcttgtaatttactgtgttttttattcggttttcgctatcgaactgtgaaatggaaatggatggagaagagttaatgaatgatatggtccttttgttcattctcaaattaatattatttgttttttctcttatttgttgtgtgttgaatttgaaattataagagatatgcaaacattttgttttgagtaaaaatgtgtcaaatcgtggcctctaatgaccgaagttaatatgaggagtaaaacacttgtagttgtaccattatgcttattcactaggcaacaaatatattttcagacctagaaaagctgcaaatgttactgaatacaagtatgtcctcttgtgttttagacatttatgaactttcctttatgtaattttccagaatccttgtcagattctaatcattgctttataattatagttatactcatggatttgtagttgagtatgaaaatattttttaatgcattttatgacttgccaattgattgacaacatgcatcaatcgactagtcgacgagtcagtaataaacggcgtcaaagtggttgcagccggcacacacgagtcgtgtttatcaactcaaagcacaaatacttttcctcaacctaaaaataaggcaattagccaaaaacaactttgcgtgtaaacaacgctcaatacacgtgtcattttattattagctattgcttcaccgccttagctttctcgtgacctagtcgtcctcgtcttttcttcttcttcttctataaaacaatacccaaagagctcttcttcttcacaattcagatttcaatttctcaaaatcttaaaaactttctctcaattctctctaccgtgatcaaggtaaatttctgtgttccttattctctcaaaatcttcgattttgttttcgttcgatcccaatttcgtatatgttctttggtttagattctgttaatcttagatcgaagacgattttctgggtttgatcgttagatatcatcttaattctcgattagggtttcatagatatcatccgatttgttcaaataatttgagttttgtcgaataattactcttcgatttgtgatttctatctagatctggtgttagtttctagtttgtgcgatcgaatttgtagattaatctgagtttttctgattaacaccacaccaatctggtaccagaaaaggggagaagcaaaaccatgggtaaaaagcctgaactcaccgcgacgtctgtcgagaagtttctgatcgaaaagttcgacagcgtctccgacctgatgcagctctcggagggcgaagaatctcgtgctttcagcttcgatgtaggagggcgtggatatgtcctgcgggtaaatagctgcgccgatggtttctacaaagatcgttatgtttatcggcactttgcatcggccgcgctcccgattccggaagtgcttgacattggggcattcagcgagagcctgacctattgcatctcccgccgtgcacagggtgtcacgttgcaagacctgcctgaaaccgaactgcccgctgttctgcaaccggtcgcggaggcgatggatgccatcgctgcggccgatcttagccagacgagcgggttcggcccattcggaccgcaaggaatcggtcaatacactacatggcgtgatttcatatgcgcgattgctgatccccatgtgtatcactggcaaactgtgatggacgacaccgtcagtgcgtccgtcgcgcaggctctcgatgagctgatgctttgggccgaggactgccccgaagtccggcacctcgtgcacgcggatttcggctccaacaatgtcctgacggacaatggccgcataacagcggtcattgactggagcgaggcgatgttcggggattcccaatacgaggtcgccaacatcttcttctggaggccgtggttggcttgtatggagcagcagacgcgctacttcgagcggaggcatccggagcttgcaggatcgccgcggctccgggcgtatatgctccgcattggtcttgaccaactctatcagagcttggttgacggcaatttcgatgatgcagcttgggcgcagggtcgatgcgacgcaatcgtccgatccggagccgggactgtcgggcgtacacaaatcgcccgcagaagcgcggccgtctggaccgatggctgtgtagaagtactcgccgatagtggaaaccgacgccccagcactcgtccgagggcaaaggaatagatgcatcctgctttaatgagatatgcgagacgcctatgatcgcatgatatttgctttcaattctgttgtgcacgttgtaaaaaacctgagcatgtgtagctcagatccttaccgccggtttcggttcattctaatgaatatatcacccgttactatcgtatttttatgaataatattctccgttcaatttactgattgtaccctactacttatatgtacaatattaaaatgaaaacaatatattgtgctgaataggtttatagcgacatctatgatagagcgccacaataacaaacaattgcgttttattattacaaatccaattttaaaaaaagcggcagaaccggtcaaacctaaaagactgattacataaatcttattcaaatttcaaaagtgccccaggggctagtatctacgacacaccgagcggcgaactaataacgctcactgaagggaactccggttccccgccggcgcgcatgggtgagattccttgaagttgagtattggccgtccgctctaccgaaagttacgggcaccattcaacccggtccagcacggcggccgggtaaccgacttgctgccccgagaattatgcagcatttttttggtgtatgtgggccccaaatgaagtgcaggtcaaaccttgacagtgacgacaaatcgttgggcgggtccagggcgaattttgcgacaacatgtcgaggctcagcaggaccggcatgcaagctagcttactagtgatattctatagtgtcacctaaatgtattctagaccaagcatgcacagctggcgttctcagccagatccaacgttacaccacaatatatcctgccaagatctaattccggggatcggaaatccagaagcccgagaggttgccgcctttcgggctttttctttttcaaaaaaaaaaatttataaaacgatctgttgcggccggccgccgggttgtgggcaaaggcgctcgacggtgggcaaccgcttgcggttgtccacgggcggagccggtgcgcgtagcgcattgtccacaagccaagggcgaccaataattgatatatatattcataattgaaaagctaattgaacatactacttgctgtaactacttgccggagcgaggggtgtttgcaagctgttgatctgaaagggctattagcgttctcacgtgcctttttgattagcgatttcacgtgaccttattagcgatttcacgtactccgattagcgatttcacgtaccctgattagcgatttcacgtggatagtttttggagcgggccggaaagccccgtgaatcaaggctttgcggggcattagcggtttcacgtggataactaccctctatccacaggcttccggggataaaaaagcccgctcgacggcgggctgttggatggggatcgcctgaatcgccccatcatccagccagaaagtgagggagccacggttgatgagagctttgttgtaggtggaccagttggtgattttgaacttttgctttgccacggaacggtctgcgttgtcgggaagatgcgtgatctgatccttcaactcagcaaaagttcgatttattcaacaaagccacgttgtgtctcaaaatctctgatgttacattgcacaagataaaaatatatcatcatgaacaataaaactgtctgcttacataaacagtaatacaaggggtgttatgagggaagcggtgatcgccgaagtatcgactcaactatcagaggtagttggcgtcatcgagcgccatctcgaaccgacgttgctggccgtacatttgtacggctccgcagtggatggcggcctgaagccacacagtgatattgatttgctggttacggtgaccgtaaggcttgatgaaacaacgcggcgagctttgatcaacgaccttttggaaacttcggcttcccctggagagagcgagattctccgcgctgtagaagtcaccattgttgtgcacgacgacatcattccgtggcgttatccagctaagcgcgaactgcaatttggagaatggcagcgcaatgacattcttgcaggtatcttcgagccagccacgatcgacattgatctggctatcttgctgacaaaagcaagagaacatagcgttgccttggtaggtccagcggcggaggaactctttgatccggttcctgaacaggatctatttgaggcgctaaatgaaaccttaacgctatggaactcgccgcccgactgggctggcgatgagcgaaatgtagtgcttacgttgtcccgcatttggtacagcgcagtaaccggcaaaatcgcgccgaaggatgtcgctgccgactgggcaatggagcgcctgccggcccagtatcagcccgtcatacttgaagctaggcaggcttatcttggacaagaagatcgcttggcctcgcgcgcagatcagttggaagaatttgttcactacgtgaaaggcgagatcaccaaggtagtcggcaaataatcactagaccaatgttacacatatatactttagattgatttaaaacttcatttttaatttaaaaggatctaggtgaagatcctttttgataatctcatgaccaaaatcccttaacgtgagttttcgttccactgagcgtcagaccccgtagaaaagatcaaaggatcttcttgagatcctttttttctgcgcgtaatctgctgcttgcaaacaaaaaaaccaccgctaccagcggtggtttgtttgccggatcaagagctaccaactcttcttccgaaggtaactggcttcagcagagcgcagataccaaatactgttcttctagtgtagccgtagttaggccaccacttcaagaactctgtagcaccgcctacatacctcgctctgctaatcctgttaccagtggctgctgccagtggcgataagtcgtgtcttaccgggttggactcaagacgatagttaccggataaggcgcagcggtcgggctgaacggggggttcgtgcacacagcccagcttggagcgaacgacctacaccgaactgagatacctacagcgtgagctatgagaaagcgccacgcttcccgaagggagaaaggcggacaggtatccggtaagcggcagggtcggaacaggagagcgcacgagggagcttccagggggaaacgcctggtatctttatagtcctgtcgggtttcgccacctctgacttgagcgtcgatttttgtgatgctcgtcaggggggcggagcctatggaaaaacgccagcaacgcggcctttttacggttcctggccttttgctggccttttgctcacatgagatctcaaacaaacacatacagcgacttagtttacccgccaatatatcctgtcaaggctcgaactaggctcggacgaagtaagcggccgcaaccttaattaaacacggcgcgccaacagcgatcgcaccaggtacc

SEQ ID NO: 309 - DNA, 7888 bp, synthetic construct
  source 1..7888: mol_type = other DNA; note = pAGS-0039 Lhcf.1 promoter
acctctgaggcggaaagaaccagctgtggaatgtgtgtcagttagggtgtggaaagtccccaggctccccagcaggcagaagtatgcaaagcatgcatctcaattagtcagcaaccaggtgtggaaagtccccaggctccccagcaggcagaagtatgcaaagcatgcatctcaattagtcagcaaccatagtcccgcccctaactccgcccatcccgcccctaactccgcccagttccgcccattctccgccccatggctgactaattttttttatttatgcagaggccgaggccgcctcggcctctgagctattccagaagtagtgaggaggcttttttggaggcctaggcttttgcaaaaacagtattcagtcgactggtaccaacaggctatggaagacgccaaaaacataaagaaaggcccggcgccattctatccgctggaagatggaaccgctggagagcaactgcataaggctatgaagagatacgccctggttcctggaacaattgcttttacagatgcacatatcgaggtggacatcacttacgctgagtacttcgaaatgtccgttcggttggcagaagctatgaaacgatatgggctgaatacaaatcacagaatcgtcgtatgcagtgaaaactctcttcaattctttatgccggtgttgggcgcgttatttatcggagttgcagttgcgcccgcgaacgacatttataatgaacgtgaattgctcaacagtatgggcatttcgcagcctaccgtggtgttcgtttccaaaaaggggttgcaaaaaattttgaacgtgcaaaaaaagctcccaatcatccaaaaaattattatcatggattctaaaacggattaccagggatttcagtcgatgtacacgttcgtcacatctcatctacctcccggttttaatgaatacgattttgtgccagagtccttcgatagggacaagacaattgcactgatcatgaactcctctggatctactggtctgcctaaaggtgtcgctctgcctcatagaactgcctgcgtgagattctcgcatgccagagatcctatttttggcaatcaaatcattccggatactgcgattttaagtgttgttccattccatcacggttttggaatgtttactacactcggatatttgatatgtggatttcgagtcgtcttaatgtatagatttgaagaagagctgtttctgaggagccttcaggattacaagattcaaagtgcgctgctggtgccaaccctattctccttcttcgccaaaagcactctgattgacaaatacgatttatctaatttacacgaaattgcttctggtggcgctcccctctctaaggaagtcggggaagcggttgccaagaggttccatctgccaggtatcaggcaaggatatgggctcactgagactacatcagctattctgattacacccgagggggatgataaaccgggcgcggtcggtaaagttgttccattttttgaagcgaaggttgtggatctggataccgggaaaacgctgggcgttaatcaaagaggcgaactgtgtgtgagaggtcctatgattatgtccggttatgtaaacaatccggaagcgaccaacgccttgattgacaaggatggatggctacattctggagacatagcttactgggacgaagacgaacacttcttcatcgttgaccgcctgaagtctctgattaagtacaaaggctatcaggtggctcccgctgaattggaatccatcttgctccaacaccccaacatcttcgacgcaggtgtcgcaggtcttcccgacgatgacgccggtgaacttcccgccgccgttgttgttttggagcacggaaagacgatgacggaaaaagagatcgtggattacgtcgccagtcaagtaacaaccgcgaaaaagttgcgcggaggagttgtgtttgtggacgaagtaccgaaaggtcttaccggaaaactcgacgcaagaaaaatcagagagatcctcataaaggccaagaagggcggaaagatcgccgtgtcaggtggatcctagataacctttaccttcattccctgtaaattggtaccctgcaaagctttcgttcgtatcatcggtttcgacaacgttcgtcaagttcaatgcatcagtttcattgcgcacacaccagaatcctactgagtttgagtattatggcattgggaaaactgtttttcttgtaccatttgttgtgcttgtaatttactgtgttttttattcggttttcgctatcgaactgtgaaatggaaatggatggagaagagttaatgaatgatatggtccttttgttcattctcaaattaatattatttgttttttctcttatttgttgtgtgttgaatttgaaattataagagatatgcaaacattttgttttgagtaaaaatgtgtcaaatcgtggcctctaatgaccgaagttaatatgaggagtaaaacacttgtagttgtaccattatgcttattcactaggcaacaaatatattttcagacctagaaaagctgcaaatgttactgaatacaagtatgtcctcttgtgttttagacatttatgaactttcctttatgtaattttccagaatccttgtcagattctaatcattgctttataattatagttatactcatggatttgtagttgagtatgaaaatattttttaatgcattttatgacttgccaattgattgacaacatgcatcaatcgactagtcgacgagtcagtaataaacggcgtcaaagtggttgcagccggcacacacgagtcgtgtttatcaactcaaagcacaaatacttttcctcaacctaaaaataaggcaattagccaaaaacaactttgcgtgtaaacaacgctcaatacacgtgtcattttattattagctattgcttcaccgccttagctttctcgtgacctagtcgtcctcgtcttttcttcttcttcttctataaaacaatacccaaagagctcttcttcttcacaattcagatttcaatttctcaaaatcttaaaaactttctctcaattctctctaccgtgatcaaggtaaatttctgtgttccttattctctcaaaatcttcgattttgttttcgttcgatcccaatttcgtatatgttctttggtttagattctgttaatcttagatcgaagacgattttctgggtttgatcgttagatatcatcttaattctcgattagggtttcatagatatcatccgatttgttcaaataatttgagttttgtcgaataattactcttcgatttgtgatttctatctagatctggtgttagtttctagtttgtgcgatcgaatttgtagattaatctgagtttttctgattaacaccacaccaatctggtaccagaaaaggggagaagcaaaaccatgggtaaaaagcctgaactcaccgcgacgtctgtcgagaagtttctgatcgaaaagttcgacagcgtctccgacctgatgcagctctcggagggcgaagaatctcgtgctttcagcttcgatgtaggagggcgtggatatgtcctgcgggtaaatagctgcgccgatggtttctacaaagatcgttatgtttatcggcactttgcatcggccgcgctcccgattccggaagtgcttgacattggggcattcagcgagagcctgacctattgcatctcccgccgtgcacagggtgtcacgttgcaagacctgcctgaaaccgaactgcccgctgttctgcaaccggtcgcggaggcgatggatgccatcgctgcggccgatcttagccagacgagcgggttcggcccattcggaccgcaaggaatcggtcaatacactacatggcgtgatttcatatgcgcgattgctgatccccatgtgtatcactggcaaactgtgatggacgacaccgtcagtgcgtccgtcgcgcaggctctcgatgagctgatgctttgggccgaggactgccccgaagtccggcacctcgtgcacgcggatttcggctccaacaatgtcctgacggacaatggccgcataacagcggtcattgactggagcgaggcgatgttcggggattcccaatacgaggtcgccaacatcttcttctggaggccgtggttggcttgtatggagcagcagacgcgctacttcgagcggaggcatccggagcttgcaggatcgccgcggctccgggcgtatatgctccgcattggtcttgaccaactctatcagagcttggttgacggcaatttcgatgatgcagcttgggcgcagggtcgatgcgacgcaatcgtccgatccggagccgggactgtcgggcgtacacaaatcgcccgcagaagcgcggccgtctggaccgatggctgtgtagaagtactcgccgatagtggaaaccgacgccccagcactcgtccgagggcaaaggaatagatgcatcctgctttaatgagatatgcgagacgcctatgatcgcatgatatttgctttcaattctgttgtgcacgttgtaaaaaacctgagcatgtgtagctcagatccttaccgccggtttcggttcattctaatgaatatatcacccgttactatcgtatttttatgaataatattctccgttcaatttactgattgtaccctactacttatatgtacaatattaaaatgaaaacaatatattgtgctgaataggtttatagcgacatctatgatagagcgccacaataacaaacaattgcgttttattattacaaatccaattttaaaaaaagcggcagaaccggtcaaacctaaaagactgattacataaatcttattcaaatttcaaaagtgccccaggggctagtatctacgacacaccgagcggcgaactaataacgctcactgaagggaactccggttccccgccggcgcgcatgggtgagattccttgaagttgagtattggccgtccgctctaccgaaagttacgggcaccattcaacccggtccagcacggcggccgggtaaccgacttgctgccccgagaattatgcagcatttttttggtgtatgtgggccccaaatgaagtgcaggtcaaaccttgacagtgacgacaaatcgttgggcgggtccagggcgaattttgcgacaacatgtcgaggctcagcaggaccggcatgcaagctagcttactagtgatattctatagtgtcacctaaatgtattctagaccaagcatgcacagctggcgttctcagccagatccaacgttacaccacaatatatcctgccaagatctaattccggggatcggaaatccagaagcccgagaggttgccgcctttcgggctttttctttttcaaaaaaaaaaatttataaaacgatctgttgcggccggccgccgggttgtgggcaaaggcgctcgacggtgggcaaccgcttgcggttgtccacgggcggagccggtgcgcgtagcgcattgtccacaagccaagggcgaccaataattgatatatatattcataattgaaaagctaattgaacatactacttgctgtaactacttgccggagcgaggggtgtttgcaagctgttgatctgaaagggctattagcgttctcacgtgcctttttgattagcgatttcacgtgaccttattagcgatttcacgtactccgattagcgatttcacgtaccctgattagcgatttcacgtggatagtttttggagcgggccggaaagccccgtgaatcaaggctttgcggggcattagcggtttcacgtggataactaccctctatccacaggcttccggggataaaaaagcccgctcgacggcgggctgttggatggggatcgcctgaatcgccccatcatccagccagaaagtgagggagccacggttgatgagagctttgttgtaggtggaccagttggtgattttgaacttttgctttgccacggaacggtctgcgttgtcgggaagatgcgtgatctgatccttcaactcagcaaaagttcgatttattcaacaaagccacgttgtgtctcaaaatctctgatgttacattgcacaagataaaaatatatcatcatgaacaataaaactgtctgcttacataaacagtaatacaaggggtgttatgagggaagcggtgatcgccgaagtatcgactcaactatcagaggtagttggcgtcatcgagcgccatctcgaaccgacgttgctggccgtacatttgtacggctccgcagtggatggcggcctgaagccacacagtgatattgatttgctggttacggtgaccgtaaggcttgatgaaacaacgcggcgagctttgatcaacgaccttttggaaacttcggcttcccctggagagagcgagattctccgcgctgtagaagtcaccattgttgtgcacgacgacatcattccgtggcgttatccagctaagcgcgaactgcaatttggagaatggcagcgcaatgacattcttgcaggtatcttcgagccagccacgatcgacattgatctggctatcttgctgacaaaagcaagagaacatagcgttgccttggtaggtccagcggcggaggaactctttgatccggttcctgaacaggatctatttgaggcgctaaatgaaaccttaacgctatggaactcgccgcccgactgggctggcgatgagcgaaatgtagtgcttacgttgtcccgcatttggtacagcgcagtaaccggcaaaatcgcgccgaaggatgtcgctgccgactgggcaatggagcgcctgccggcccagtatcagcccgtcatacttgaagctaggcaggcttatcttggacaagaagatcgcttggcctcgcgcgcagatcagttggaagaatttgttcactacgtgaaaggcgagatcaccaaggtagtcggcaaataatcactagaccaatgttacacatatatactttagattgatttaaaacttcatttttaatttaaaaggatctaggtgaagatcctttttgataatctcatgaccaaaatcccttaacgtgagttttcgttccactgagcgtcagaccccgtagaaaagatcaaaggatcttcttgagatcctttttttctgcgcgtaatctgctgcttgcaaacaaaaaaaccaccgctaccagcggtggtttgtttgccggatcaagagctaccaactcttcttccgaaggtaactggcttcagcagagcgcagataccaaatactgttcttctagtgtagccgtagttaggccaccacttcaagaactctgtagcaccgcctacatacctcgctctgctaatcctgttaccagtggctgctgccagtggcgataagtcgtgtcttaccgggttggactcaagacgatagttaccggataaggcgcagcggtcgggctgaacggggggttcgtgcacacagcccagcttggagcgaacgacctacaccgaactgagatacctacagcgtgagctatgagaaagcgccacgcttcccgaagggagaaaggcggacaggtatccggtaagcggcagggtcggaacaggagagcgcacgagggagcttccagggggaaacgcctggtatctttatagtcctgtcgggtttcgccacctctgacttgagcgtcgatttttgtgatgctcgtcaggggggcggagcctatggaaaaacgccagcaacgcggcctttttacggttcctggccttttgctggccttttgctcacatgagatctcaaacaaacacatacagcgacttagtttacccgccaatatatcctgtcaaggctcgaactaggctcggacgaagtaagcggccgcaaccttaattaaacacggcgcgccaacagcgatcgcaccaggtacc

SEQ ID NO: 310 - DNA, 7994 bp, synthetic construct
  source 1..7994: mol_type = other DNA; note = pAGS-0040 Ubi.U4 promoter
acctcgcggaacccctatttgtttatttttctaaatacattcaaatatgtatccgctcatgagacaataaccctgataaatgcttcaataatattgaaaaaggaagagtcctgaggcggaaagaaccagctgtggaatgtgtgtcagttagggtgtggaaagtccccaggctccccagcaggcagaagtatgcaaagcatgcatctcaattagtcagcaaccaggtgtggaaagtccccaggctccccagcaggcagaagtatgcaaagcatgcatctcaattagtcagcaaccatagtcccgcccctaactccgcccatcccgcccctaactccgcccagttccgcccattctccgccccatggctgactaattttttttatttatgcagaggccgaggccgcctcggcctctgagctattccagaagtagtgaggaggcttttttggaggcctaggcttttgcaaaaacagtattcagtcgactggtaccaacaggctatggaagacgccaaaaacataaagaaaggcccggcgccattctatccgctggaagatggaaccgctggagagcaactgcataaggctatgaagagatacgccctggttcctggaacaattgcttttacagatgcacatatcgaggtggacatcacttacgctgagtacttcgaaatgtccgttcggttggcagaagctatgaaacgatatgggctgaatacaaatcacagaatcgtcgtatgcagtgaaaactctcttcaattctttatgccggtgttgggcgcgttatttatcggagttgcagttgcgcccgcgaacgacatttataatgaacgtgaattgctcaacagtatgggcatttcgcagcctaccgtggtgttcgtttccaaaaaggggttgcaaaaaattttgaacgtgcaaaaaaagctcccaatcatccaaaaaattattatcatggattctaaaacggattaccagggatttcagtcgatgtacacgttcgtcacatctcatctacctcccggttttaatgaatacgattttgtgccagagtccttcgatagggacaagacaattgcactgatcatgaactcctctggatctactggtctgcctaaaggtgtcgctctgcctcatagaactgcctgcgtgagattctcgcatgccagagatcctatttttggcaatcaaatcattccggatactgcgattttaagtgttgttccattccatcacggttttggaatgtttactacactcggatatttgatatgtggatttcgagtcgtcttaatgtatagatttgaagaagagctgtttctgaggagccttcaggattacaagattcaaagtgcgctgctggtgccaaccctattctccttcttcgccaaaagcactctgattgacaaatacgatttatctaatttacacgaaattgcttctggtggcgctcccctctctaaggaagtcggggaagcggttgccaagaggttccatctgccaggtatcaggcaaggatatgggctcactgagactacatcagctattctgattacacccgagggggatgataaaccgggcgcggtcggtaaagttgttccattttttgaagcgaaggttgtggatctggataccgggaaaacgctgggcgttaatcaaagaggcgaactgtgtgtgagaggtcctatgattatgtccggttatgtaaacaatccggaagcgaccaacgccttgattgacaaggatggatggctacattctggagacatagcttactgggacgaagacgaacacttcttcatcgttgaccgcctgaagtctctgattaagtacaaaggctatcaggtggctcccgctgaattggaatccatcttgctccaacaccccaacatcttcgacgcaggtgtcgcaggtcttcccgacgatgacgccggtgaacttcccgccgccgttgttgttttggagcacggaaagacgatgacggaaaaagagatcgtggattacgtcgccagtcaagtaacaaccgcgaaaaagttgcgcggaggagttgtgtttgtggacgaagtaccgaaaggtcttaccggaaaactcgacgcaagaaaaatcagagagatcctcataaaggccaagaagggcggaaagatcgccgtgtcaggtggatcctagataacctttaccttcattccctgtaaattggtaccctgcaaagctttcgttcgtatcatcggtttcgacaacgttcgtcaagttcaatgcatcagtttcattgcgcacacaccagaatcctactgagtttgagtattatggcattgggaaaactgtttttcttgtaccatttgttgtgcttgtaatttactgtgttttttattcggttttcgctatcgaactgtgaaatggaaatggatggagaagagttaatgaatgatatggtccttttgttcattctcaaattaatattatttgttttttctcttatttgttgtgtgttgaatttgaaattataagagatatgcaaacattttgttttgagtaaaaatgtgtcaaatcgtggcctctaatgaccgaagttaatatgaggagtaaaacacttgtagttgtaccattatgcttattcactaggcaacaaatatattttcagacctagaaaagctgcaaatgttactgaatacaagtatgtcctcttgtgttttagacatttatgaactttcctttatgtaattttccagaatccttgtcagattctaatcattgctttataattatagttatactcatggatttgtagttgagtatgaaaatattttttaatgcattttatgacttgccaattgattgacaacatgcatcaatcgactagtcgacgagtcagtaataaacggcgtcaaagtggttgcagccggcacacacgagtcgtgtttatcaactcaaagcacaaatacttttcctcaacctaaaaataaggcaattagccaaaaacaactttgcgtgtaaacaacgctcaatacacgtgtcattttattattagctattgcttcaccgccttagctttctcgtgacctagtcgtcctcgtcttttcttcttcttcttctataaaacaatacccaaagagctcttcttcttcacaattcagatttcaatttctcaaaatcttaaaaactttctctcaattctctctaccgtgatcaaggtaaatttctgtgttccttattctctcaaaatcttcgattttgttttcgttcgatcccaatttcgtatatgttctttggtttagattctgttaatcttagatcgaagacgattttctgggtttgatcgttagatatcatcttaattctcgattagggtttcatagatatcatccgatttgttcaaataatttgagttttgtcgaataattactcttcgatttgtgatttctatctagatctggtgttagtttctagtttgtgcgatcgaatttgtagattaatctgagtttttctgattaacaccacaccaatctggtaccagaaaaggggagaagcaaaaccatgggtaaaaagcctgaactcaccgcgacgtctgtcgagaagtttctgatcgaaaagttcgacagcgtctccgacctgatgcagctctcggagggcgaagaatctcgtgctttcagcttcgatgtaggagggcgtggatatgtcctgcgggtaaatagctgcgccgatggtttctacaaagatcgttatgtttatcggcactttgcatcggccgcgctcccgattccggaagtgcttgacattggggcattcagcgagagcctgacctattgcatctcccgccgtgcacagggtgtcacgttgcaagacctgcctgaaaccgaactgcccgctgttctgcaaccggtcgcggaggcgatggatgccatcgctgcggccgatcttagccagacgagcgggttcggcccattcggaccgcaaggaatcggtcaatacactacatggcgtgatttcatatgcgcgattgctgatccccatgtgtatcactggcaaactgtgatggacgacaccgtcagtgcgtccgtcgcgcaggctctcgatgagctgatgctttgggccgaggactgccccgaagtccggcacctcgtgcacgcggatttcggctccaacaatgtcctgacggacaatggccgcataacagcggtcattgactggagcgaggcgatgttcggggattcccaatacgaggtcgccaacatcttcttctggaggccgtggttggcttgtatggagcagcagacgcgctacttcgagcggaggcatccggagcttgcaggatcgccgcggctccgggcgtatatgctccgcattggtcttgaccaactctatcagagcttggttgacggcaatttcgatgatgcagcttgggcgcagggtcgatgcgacgcaatcgtccgatccggagccgggactgtcgggcgtacacaaatcgcccgcagaagcgcggccgtctggaccgatggctgtgtagaagtactcgccgatagtggaaaccgacgccccagcactcgtccgagggcaaaggaatagatgcatcctgctttaatgagatatgcgagacgcctatgatcgcatgatatttgctttcaattctgttgtgcacgttgtaaaaaacctgagcatgtgtagctcagatccttaccgccggtttcggttcattctaatgaatatatcacccgttactatcgtatttttatgaataatattctccgttcaatttactgattgtaccctactacttatatgtacaatattaaaatgaaaacaatatattgtgctgaataggtttatagcgacatctatgatagagcgccacaataacaaacaattgcgttttattattacaaatccaattttaaaaaaagcggcagaaccggtcaaacctaaaagactgattacataaatcttattcaaatttcaaaagtgccccaggggctagtatctacgacacaccgagcggcgaactaataacgctcactgaagggaactccggttccccgccggcgcgcatgggtgagattccttgaagttgagtattggccgtccgctctaccgaaagttacgggcaccattcaacccggtccagcacggcggccgggtaaccgacttgctgccccgagaattatgcagcatttttttggtgtatgtgggccccaaatgaagtgcaggtcaaaccttgacagtgacgacaaatcgttgggcgggtccagggcgaattttgcgacaacatgtcgaggctcagcaggaccggcatgcaagctagcttactagtgatattctatagtgtcacctaaatgtattctagaccaagcatgcacagctggcgttctcagccagatccaacgttacaccacaatatatcctgccaagatctaattccggggatcggaaatccagaagcccgagaggttgccgcctttcgggctttttctttttcaaaaaaaaaaatttataaaacgatctgttgcggccggccgccgggttgtgggcaaaggcgctcgacggtgggcaaccgcttgcggttgtccacgggcggagccggtgcgcgtagcgcattgtccacaagccaagggcgaccaataattgatatatatattcataattgaaaagctaattgaacatactacttgctgtaactacttgccggagcgaggggtgtttgcaagctgttgatctgaaagggctattagcgttctcacgtgcctttttgattagcgatttcacgtgaccttattagcgatttcacgtactccgattagcgatttcacgtaccctgattagcgatttcacgtggatagtttttggagcgggccggaaagccccgtgaatcaaggctttgcggggcattagcggtttcacgtggataactaccctctatccacaggcttccggggataaaaaagcccgctcgacggcgggctgttggatggggatcgcctgaatcgccccatcatccagccagaaagtgagggagccacggttgatgagagctttgttgtaggtggaccagttggtgattttgaacttttgctttgccacggaacggtctgcgttgtcgggaagatgcgtgatctgatccttcaactcagcaaaagttcgatttattcaacaaagccacgttgtgtctcaaaatctctgatgttacattgcacaagataaaaatatatcatcatgaacaataaaactgtctgcttacataaacagtaatacaaggggtgttatgagggaagcggtgatcgccgaagtatcgactcaactatcagaggtagttggcgtcatcgagcgccatctcgaaccgacgttgctggccgtacatttgtacggctccgcagtggatggcggcctgaagccacacagtgatattgatttgctggttacggtgaccgtaaggcttgatgaaacaacgcggcgagctttgatcaacgaccttttggaaacttcggcttcccctggagagagcgagattctccgcgctgtagaagtcaccattgttgtgcacgacgacatcattccgtggcgttatccagctaagcgcgaactgcaatttggagaatggcagcgcaatgacattcttgcaggtatcttcgagccagccacgatcgacattgatctggctatcttgctgacaaaagcaagagaacatagcgttgccttggtaggtccagcggcggaggaactctttgatccggttcctgaacaggatctatttgaggcgctaaatgaaaccttaacgctatggaactcgccgcccgactgggctggcgatgagcgaaatgtagtgcttacgttgtcccgcatttggtacagcgcagtaaccggcaaaatcgcgccgaaggatgtcgctgccgactgggcaatggagcgcctgccggcccagtatcagcccgtcatacttgaagctaggcaggcttatcttggacaagaagatcgcttggcctcgcgcgcagatcagttggaagaatttgttcactacgtgaaaggcgagatcaccaaggtagtcggcaaataatcactagaccaatgttacacatatatactttagattgatttaaaacttcatttttaatttaaaaggatctaggtgaagatcctttttgataatctcatgaccaaaatcccttaacgtgagttttcgttccactgagcgtcagaccccgtagaaaagatcaaaggatcttcttgagatcctttttttctgcgcgtaatctgctgcttgcaaacaaaaaaaccaccgctaccagcggtggtttgtttgccggatcaagagctaccaactcttcttccgaaggtaactggcttcagcagagcgcagataccaaatactgttcttctagtgtagccgtagttaggccaccacttcaagaactctgtagcaccgcctacatacctcgctctgctaatcctgttaccagtggctgctgccagtggcgataagtcgtgtcttaccgggttggactcaagacgatagttaccggataaggcgcagcggtcgggctgaacggggggttcgtgcacacagcccagcttggagcgaacgacctacaccgaactgagatacctacagcgtgagctatgagaaagcgccacgcttcccgaagggagaaaggcggacaggtatccggtaagcggcagggtcggaacaggagagcgcacgagggagcttccagggggaaacgcctggtatctttatagtcctgtcgggtttcgccacctctgacttgagcgtcgatttttgtgatgctcgtcaggggggcggagcctatggaaaaacgccagcaacgcggcctttttacggttcctggccttttgctggccttttgctcacatgagatctcaaacaaacacatacagcgacttagtttacccgccaatatatcctgtcaaggctcgaactaggctcggacgaagtaagcggccgcaaccttaattaaacacggcgcgccaacagcgatcgcaccaggtacc

SEQ ID NO: 311 - DNA, 7854 bp, synthetic construct
  source 1..7854: mol_type = other DNA; note = pAGS-0041 CAM 35S promoter
accttccattttgacatgtttcctagctagaaggaacagctattcatatgaattttccgaggtcacgctgtgatggatcgattcgttcccgtcacagacgcaagcagcgaggtgatggctggacgggcacgcgtcacaatttagaacaacccggactcttgtgacgcgagctccgggtgcggaaaaccctacggggtgaaaggagccgcagcttccacccatttacttgactgataacccagtacacacaacgctaccgtgacggaaatgccgcgcgctgtgaagccgtggtgaatctttcgctgctgctcgttctctccacacacacaacagtattcagtcgactggtaccaacaggctatggaagacgccaaaaacataaagaaaggcccggcgccattctatccgctggaagatggaaccgctggagagcaactgcataaggctatgaagagatacgccctggttcctggaacaattgcttttacagatgcacatatcgaggtggacatcacttacgctgagtacttcgaaatgtccgttcggttggcagaagctatgaaacgatatgggctgaatacaaatcacagaatcgtcgtatgcagtgaaaactctcttcaattctttatgccggtgttgggcgcgttatttatcggagttgcagttgcgcccgcgaacgacatttataatgaacgtgaattgctcaacagtatgggcatttcgcagcctaccgtggtgttcgtttccaaaaaggggttgcaaaaaattttgaacgtgcaaaaaaagctcccaatcatccaaaaaattattatcatggattctaaaacggattaccagggatttcagtcgatgtacacgttcgtcacatctcatctacctcccggttttaatgaatacgattttgtgccagagtccttcgatagggacaagacaattgcactgatcatgaactcctctggatctactggtctgcctaaaggtgtcgctctgcctcatagaactgcctgcgtgagattctcgcatgccagagatcctatttttggcaatcaaatcattccggatactgcgattttaagtgttgttccattccatcacggttttggaatgtttactacactcggatatttgatatgtggatttcgagtcgtcttaatgtatagatttgaagaagagctgtttctgaggagccttcaggattacaagattcaaagtgcgctgctggtgccaaccctattctccttcttcgccaaaagcactctgattgacaaatacgatttatctaatttacacgaaattgcttctggtggcgctcccctctctaaggaagtcggggaagcggttgccaagaggttccatctgccaggtatcaggcaaggatatgggctcactgagactacatcagctattctgattacacccgagggggatgataaaccgggcgcggtcggtaaagttgttccattttttgaagcgaaggttgtggatctggataccgggaaaacgctgggcgttaatcaaagaggcgaactgtgtgtgagaggtcctatgattatgtccggttatgtaaacaatccggaagcgaccaacgccttgattgacaaggatggatggctacattctggagacatagcttactgggacgaagacgaacacttcttcatcgttgaccgcctgaagtctctgattaagtacaaaggctatcaggtggctcccgctgaattggaatccatcttgctccaacaccccaacatcttcgacgcaggtgtcgcaggtcttcccgacgatgacgccggtgaacttcccgccgccgttgttgttttggagcacggaaagacgatgacggaaaaagagatcgtggattacgtcgccagtcaagtaacaaccgcgaaaaagttgcgcggaggagttgtgtttgtggacgaagtaccgaaaggtcttaccggaaaactcgacgcaagaaaaatcagagagatcctcataaaggccaagaagggcggaaagatcgccgtgtcaggtggatcctagataacctttaccttcattccctgtaaattggtaccctgcaaagctttcgttcgtatcatcggtttcgacaacgttcgtcaagttcaatgcatcagtttcattgcgcacacaccagaatcctactgagtttgagtattatggcattgggaaaactgtttttcttgtaccatttgttgtgcttgtaatttactgtgttttttattcggttttcgctatcgaactgtgaaatggaaatggatggagaagagttaatgaatgatatggtccttttgttcattctcaaattaatattatttgttttttctcttatttgttgtgtgttgaatttgaaattataagagatatgcaaacattttgttttgagtaaaaatgtgtcaaatcgtggcctctaatgaccgaagttaatatgaggagtaaaacacttgtagttgtaccattatgcttattcactaggcaacaaatatattttcagacctagaaaagctgcaaatgttactgaatacaagtatgtcctcttgtgttttagacatttatgaactttcctttatgtaattttccagaatccttgtcagattctaatcattgctttataattatagttatactcatggatttgtagttgagtatgaaaatattttttaatgcattttatgacttgccaattgattgacaacatgcatcaatcgactagtcgacgagtcagtaataaacggcgtcaaagtggttgcagccggcacacacgagtcgtgtttatcaactcaaagcacaaatacttttcctcaacctaaaaataaggcaattagccaaaaacaactttgcgtgtaaacaacgctcaatacacgtgtcattttattattagctattgcttcaccgccttagctttctcgtgacctagtcgtcctcgtcttttcttcttcttcttctataaaacaatacccaaagagctcttcttcttcacaattcagatttcaatttctcaaaatcttaaaaactttctctcaattctctctaccgtgatcaaggtaaatttctgtgttccttattctctcaaaatcttcgattttgttttcgttcgatcccaatttcgtatatgttctttggtttagattctgttaatcttagatcgaagacgattttctgggtttgatcgttagatatcatcttaattctcgattagggtttcatagatatcatccgatttgttcaaataatttgagttttgtcgaataattactcttcgatttgtgatttctatctagatctggtgttagtttctagtttgtgcgatcgaatttgtagattaatctgagtttttctgattaacaccacaccaatctggtaccagaaaaggggagaagcaaaaccatgggtaaaaagcctgaactcaccgcgacgtctgtcgagaagtttctgatcgaaaagttcgacagcgtctccgacctgatgcagctctcggagggcgaagaatctcgtgctttcagcttcgatgtaggagggcgtggatatgtcctgcgggtaaatagctgcgccgatggtttctacaaagatcgttatgtttatcggcactttgcatcggccgcgctcccgattccggaagtgcttgacattggggcattcagcgagagcctgacctattgcatctcccgccgtgcacagggtgtcacgttgcaagacctgcctgaaaccgaactgcccgctgttctgcaaccggtcgcggaggcgatggatgccatcgctgcggccgatcttagccagacgagcgggttcggcccattcggaccgcaaggaatcggtcaatacactacatggcgtgatttcatatgcgcgattgctgatccccatgtgtatcactggcaaactgtgatggacgacaccgtcagtgcgtccgtcgcgcaggctctcgatgagctgatgctttgggccgaggactgccccgaagtccggcacctcgtgcacgcggatttcggctccaacaatgtcctgacggacaatggccgcataacagcggtcattgactggagcgaggcgatgttcggggattcccaatacgaggtcgccaacatcttcttctggaggccgtggttggcttgtatggagcagcagacgcgctacttcgagcggaggcatccggagcttgcaggatcgccgcggctccgggcgtatatgctccgcattggtcttgaccaactctatcagagcttggttgacggcaatttcgatgatgcagcttgggcgcagggtcgatgcgacgcaatcgtccgatccggagccgggactgtcgggcgtacacaaatcgcccgcagaagcgcggccgtctggaccgatggctgtgtagaagtactcgccgatagtggaaaccgacgccccagcactcgtccgagggcaaaggaatagatgcatcctgctttaatgagatatgcgagacgcctatgatcgcatgatatttgctttcaattctgttgtgcacgttgtaaaaaacctgagcatgtgtagctcagatccttaccgccggtttcggttcattctaatgaatatatcacccgttactatcgtatttttatgaataatattctccgttcaatttactgattgtaccctactacttatatgtacaatattaaaatgaaaacaatatattgtgctgaataggtttatagcgacatctatgatagagcgccacaataacaaacaattgcgttttattattacaaatccaattttaaaaaaagcggcagaaccggtcaaacctaaaagactgattacataaatcttattcaaatttcaaaagtgccccaggggctagtatctacgacacaccgagcggcgaactaataacgctcactgaagggaactccggttccccgccggcgcgcatgggtgagattccttgaagttgagtattggccgtccgctctaccgaaagttacgggcaccattcaacccggtccagcacggcggccgggtaaccgacttgctgccccgagaattatgcagcatttttttggtgtatgtgggccccaaatgaagtgcaggtcaaaccttgacagtgacgacaaatcgttgggcgggtccagggcgaattttgcgacaacatgtcgaggctcagcaggaccggcatgcaagctagcttactagtgatattctatagtgtcacctaaatgtattctagaccaagcatgcacagctggcgttctcagccagatccaacgttacaccacaatatatcctgccaagatctaattccggggatcggaaatccagaagcccgagaggttgccgcctttcgggctttttctttttcaaaaaaaaaaatttataaaacgatctgttgcggccggccgccgggttgtgggcaaaggcgctcgacggtgggcaaccgcttgcggttgtccacgggcggagccggtgcgcgtagcgcattgtccacaagccaagggcgaccaataattgatatatatattcataattgaaaagctaattgaacatactacttgctgtaactacttgccggagcgaggggtgtttgcaagctgttgatctgaaagggctattagcgttctcacgtgcctttttgattagcgatttcacgtgaccttattagcgatttcacgtactccgattagcgatttcacgtaccctgattagcgatttcacgtggatagtttttggagcgggccggaaagccccgtgaatcaaggctttgcggggcattagcggtttcacgtggataactaccctctatccacaggcttccggggataaaaaagcccgctcgacggcgggctgttggatggggatcgcctgaatcgccccatcatccagccagaaagtgagggagccacggttgatgagagctttgttgtaggtggaccagttggtgattttgaacttttgctttgccacggaacggtctgcgttgtcgggaagatgcgtgatctgatccttcaactcagcaaaagttcgatttattcaacaaagccacgttgtgtctcaaaatctctgatgttacattgcacaagataaaaatatatcatcatgaacaataaaactgtctgcttacataaacagtaatacaaggggtgttatgagggaagcggtgatcgccgaagtatcgactcaactatcagaggtagttggcgtcatcgagcgccatctcgaaccgacgttgctggccgtacatttgtacggctccgcagtggatggcggcctgaagccacacagtgatattgatttgctggttacggtgaccgtaaggcttgatgaaacaacgcggcgagctttgatcaacgaccttttggaaacttcggcttcccctggagagagcgagattctccgcgctgtagaagtcaccattgttgtgcacgacgacatcattccgtggcgttatccagctaagcgcgaactgcaatttggagaatggcagcgcaatgacattcttgcaggtatcttcgagccagccacgatcgacattgatctggctatcttgctgacaaaagcaagagaacatagcgttgccttggtaggtccagcggcggaggaactctttgatccggttcctgaacaggatctatttgaggcgctaaatgaaaccttaacgctatggaactcgccgcccgactgggctggcgatgagcgaaatgtagtgcttacgttgtcccgcatttggtacagcgcagtaaccggcaaaatcgcgccgaaggatgtcgctgccgactgggcaatggagcgcctgccggcccagtatcagcccgtcatacttgaagctaggcaggcttatcttggacaagaagatcgcttggcctcgcgcgcagatcagttggaagaatttgttcactacgtgaaaggcgagatcaccaaggtagtcggcaaataatcactagaccaatgttacacatatatactttagattgatttaaaacttcatttttaatttaaaaggatctaggtgaagatcctttttgataatctcatgaccaaaatcccttaacgtgagttttcgttccactgagcgtcagaccccgtagaaaagatcaaaggatcttcttgagatcctttttttctgcgcgtaatctgctgcttgcaaacaaaaaaaccaccgctaccagcggtggtttgtttgccggatcaagagctaccaactcttcttccgaaggtaactggcttcagcagagcgcagataccaaatactgttcttctagtgtagccgtagttaggccaccacttcaagaactctgtagcaccgcctacatacctcgctctgctaatcctgttaccagtggctgctgccagtggcgataagtcgtgtcttaccgggttggactcaagacgatagttaccggataaggcgcagcggtcgggctgaacggggggttcgtgcacacagcccagcttggagcgaacgacctacaccgaactgagatacctacagcgtgagctatgagaaagcgccacgcttcccgaagggagaaaggcggacaggtatccggtaagcggcagggtcggaacaggagagcgcacgagggagcttccagggggaaacgcctggtatctttatagtcctgtcgggtttcgccacctctgacttgagcgtcgatttttgtgatgctcgtcaggggggcggagcctatggaaaaacgccagcaacgcggcctttttacggttcctggccttttgctggccttttgctcacatgagatctcaaacaaacacatacagcgacttagtttacccgccaatatatcctgtcaaggctcgaactaggctcggacgaagtaagcggccgcaaccttaattaaacacggcgcgccaacagcgatcgcaccaggtacc

SEQ ID NO: 312 - DNA, 8180 bp, synthetic construct
  source 1..8180: mol_type = other DNA; note = pAGS-0042 MAS promoter
acctgcaatctcacgcaccaggcgctggaagggcaacttgcggatgagaaggtccgtggacttctggtaacgacggatctcacgcagagcgacggttccagggcgataacggtggggcttcttgactcctccggtagccggagcggacttacgggcagccttggtggcaagctgcttgcgcggcgctttgcctccggtggatttacgggcggtttgcttggttcgggccattttgacggttttttttacaagagaagagttcttgaaatttgtgaggttaaagtgtgtggcttccgccgtagtcaaggagcgtgcggttgccgatcgcaccggtacgttctgtagaaatgaacacagtgtgttgaattgaaagtatggcgcaggtatggtgtgtgataagtagcagccgcgccgagacaaacaaactttggtttctacgacaatctctgtagacaagtactagaaacccgtttgaacgagcataaatctgcaccggcaggccaccagacatcgtttcaacgtaatattctacgtaaccattttatcccaggaaacctacggcctgtgaaccactgaaaggaagcactcacaattcgctctcggcaacaaccgacaatagtcttactcacagtcaataccgaaaacaaacaacagaacagtattcagtcgactggtaccaacaggctatggaagacgccaaaaacataaagaaaggcccggcgccattctatccgctggaagatggaaccgctggagagcaactgcataaggctatgaagagatacgccctggttcctggaacaattgcttttacagatgcacatatcgaggtggacatcacttacgctgagtacttcgaaatgtccgttcggttggcagaagctatgaaacgatatgggctgaatacaaatcacagaatcgtcgtatgcagtgaaaactctcttcaattctttatgccggtgttgggcgcgttatttatcggagttgcagttgcgcccgcgaacgacatttataatgaacgtgaattgctcaacagtatgggcatttcgcagcctaccgtggtgttcgtttccaaaaaggggttgcaaaaaattttgaacgtgcaaaaaaagctcccaatcatccaaaaaattattatcatggattctaaaacggattaccagggatttcagtcgatgtacacgttcgtcacatctcatctacctcccggttttaatgaatacgattttgtgccagagtccttcgatagggacaagacaattgcactgatcatgaactcctctggatctactggtctgcctaaaggtgtcgctctgcctcatagaactgcctgcgtgagattctcgcatgccagagatcctatttttggcaatcaaatcattccggatactgcgattttaagtgttgttccattccatcacggttttggaatgtttactacactcggatatttgatatgtggatttcgagtcgtcttaatgtatagatttgaagaagagctgtttctgaggagccttcaggattacaagattcaaagtgcgctgctggtgccaaccctattctccttcttcgccaaaagcactctgattgacaaatacgatttatctaatttacacgaaattgcttctggtggcgctcccctctctaaggaagtcggggaagcggttgccaagaggttccatctgccaggtatcaggcaaggatatgggctcactgagactacatcagctattctgattacacccgagggggatgataaaccgggcgcggtcggtaaagttgttccattttttgaagcgaaggttgtggatctggataccgggaaaacgctgggcgttaatcaaagaggcgaactgtgtgtgagaggtcctatgattatgtccggttatgtaaacaatccggaagcgaccaacgccttgattgacaaggatggatggctacattctggagacatagcttactgggacgaagacgaacacttcttcatcgttgaccgcctgaagtctctgattaagtacaaaggctatcaggtggctcccgctgaattggaatccatcttgctccaacaccccaacatcttcgacgcaggtgtcgcaggtcttcccgacgatgacgccggtgaacttcccgccgccgttgttgttttggagcacggaaagacgatgacggaaaaagagatcgtggattacgtcgccagtcaagtaacaaccgcgaaaaagttgcgcggaggagttgtgtttgtggacgaagtaccgaaaggtcttaccggaaaactcgacgcaagaaaaatcagagagatcctcataaaggccaagaagggcggaaagatcgccgtgtcaggtggatcctagataacctttaccttcattccctgtaaattggtaccctgcaaagctttcgttcgtatcatcggtttcgacaacgttcgtcaagttcaatgcatcagtttcattgcgcacacaccagaatcctactgagtttgagtattatggcattgggaaaactgtttttcttgtaccatttgttgtgcttgtaatttactgtgttttttattcggttttcgctatcgaactgtgaaatggaaatggatggagaagagttaatgaatgatatggtccttttgttcattctcaaattaatattatttgttttttctcttatttgttgtgtgttgaatttgaaattataagagatatgcaaacattttgttttgagtaaaaatgtgtcaaatcgtggcctctaatgaccgaagttaatatgaggagtaaaacacttgtagttgtaccattatgcttattcactaggcaacaaatatattttcagacctagaaaagctgcaaatgttactgaatacaagtatgtcctcttgtgttttagacatttatgaactttcctttatgtaattttccagaatccttgtcagattctaatcattgctttataattatagttatactcatggatttgtagttgagtatgaaaatattttttaatgcattttatgacttgccaattgattgacaacatgcatcaatcgactagtcgacgagtcagtaataaacggcgtcaaagtggttgcagccggcacacacgagtcgtgtttatcaactcaaagcacaaatacttttcctcaacctaaaaataaggcaattagccaaaaacaactttgcgtgtaaacaacgctcaatacacgtgtcattttattattagctattgcttcaccgccttagctttctcgtgacctagtcgtcctcgtcttttcttcttcttcttctataaaacaatacccaaagagctcttcttcttcacaattcagatttcaatttctcaaaatcttaaaaactttctctcaattctctctaccgtgatcaaggtaaatttctgtgttccttattctctcaaaatcttcgattttgttttcgttcgatcccaatttcgtatatgttctttggtttagattctgttaatcttagatcgaagacgattttctgggtttgatcgttagatatcatcttaattctcgattagggtttcatagatatcatccgatttgttcaaataatttgagttttgtcgaataattactcttcgatttgtgatttctatctagatctggtgttagtttctagtttgtgcgatcgaatttgtagattaatctgagtttttctgattaacaccacaccaatctggtaccagaaaaggggagaagcaaaaccatgggtaaaaagcctgaactcaccgcgacgtctgtcgagaagtttctgatcgaaaagttcgacagcgtctccgacctgatgcagctctcggagggcgaagaatctcgtgctttcagcttcgatgtaggagggcgtggatatgtcctgcgggtaaatagctgcgccgatggtttctacaaagatcgttatgtttatcggcactttgcatcggccgcgctcccgattccggaagtgcttgacattggggcattcagcgagagcctgacctattgcatctcccgccgtgcacagggtgtcacgttgcaagacctgcctgaaaccgaactgcccgctgttctgcaaccggtcgcggaggcgatggatgccatcgctgcggccgatcttagccagacgagcgggttcggcccattcggaccgcaaggaatcggtcaatacactacatggcgtgatttcatatgcgcgattgctgatccccatgtgtatcactggcaaactgtgatggacgacaccgtcagtgcgtccgtcgcgcaggctctcgatgagctgatgctttgggccgaggactgccccgaagtccggcacctcgtgcacgcggatttcggctccaacaatgtcctgacggacaatggccgcataacagcggtcattgactggagcgaggcgatgttcggggattcccaatacgaggtcgccaacatcttcttctggaggccgtggttggcttgtatggagcagcagacgcgctacttcgagcggaggcatccggagcttgcaggatcgccgcggctccgggcgtatatgctccgcattggtcttgaccaactctatcagagcttggttgacggcaatttcgatgatgcagcttgggcgcagggtcgatgcgacgcaatcgtccgatccggagccgggactgtcgggcgtacacaaatcgcccgcagaagcgcggccgtctggaccgatggctgtgtagaagtactcgccgatagtggaaaccgacgccccagcactcgtccgagggcaaaggaatagatgcatcctgctttaatgagatatgcgagacgcctatgatcgcatgatatttgctttcaattctgttgtgcacgttgtaaaaaacctgagcatgtgtagctcagatccttaccgccggtttcggttcattctaatgaatatatcacccgttactatcgtatttttatgaataatattctccgttcaatttactgattgtaccctactacttatatgtacaatattaaaatgaaaacaatatattgtgctgaataggtttatagcgacatctatgatagagcgccacaataacaaacaattgcgttttattattacaaatccaattttaaaaaaagcggcagaaccggtcaaacctaaaagactgattacataaatcttattcaaatttcaaaagtgccccaggggctagtatctacgacacaccgagcggcgaactaataacgctcactgaagggaactccggttccccgccggcgcgcatgggtgagattccttgaagttgagtattggccgtccgctctaccgaaagttacgggcaccattcaacccggtccagcacggcggccgggtaaccgacttgctgccccgagaattatgcagcatttttttggtgtatgtgggccccaaatgaagtgcaggtcaaaccttgacagtgacgacaaatcgttgggcgggtccagggcgaattttgcgacaacatgtcgaggctcagcaggaccggcatgcaagctagcttactagtgatattctatagtgtcacctaaatgtattctagaccaagcatgcacagctggcgttctcagccagatccaacgttacaccacaatatatcctgccaagatctaattccggggatcggaaatccagaagcccgagaggttgccgcctttcgggctttttctttttcaaaaaaaaaaatttataaaacgatctgttgcggccggccgccgggttgtgggcaaaggcgctcgacggtgggcaaccgcttgcggttgtccacgggcggagccggtgcgcgtagcgcattgtccacaagccaagggcgaccaataattgatatatatattcataattgaaaagctaattgaacatactacttgctgtaactacttgccggagcgaggggtgtttgcaagctgttgatctgaaagggctattagcgttctcacgtgcctttttgattagcgatttcacgtgaccttattagcgatttcacgtactccgattagcgatttcacgtaccctgattagcgatttcacgtggatagtttttggagcgggccggaaagccccgtgaatcaaggctttgcggggcattagcggtttcacgtggataactaccctctatccacaggcttccggggataaaaaagcccgctcgacggcgggctgttggatggggatcgcctgaatcgccccatcatccagccagaaagtgagggagccacggttgatgagagctttgttgtaggtggaccagttggtgattttgaacttttgctttgccacggaacggtctgcgttgtcgggaagatgcgtgatctgatccttcaactcagcaaaagttcgatttattcaacaaagccacgttgtgtctcaaaatctctgatgttacattgcacaagataaaaatatatcatcatgaacaataaaactgtctgcttacataaacagtaatacaaggggtgttatgagggaagcggtgatcgccgaagtatcgactcaactatcagaggtagttggcgtcatcgagcgccatctcgaaccgacgttgctggccgtacatttgtacggctccgcagtggatggcggcctgaagccacacagtgatattgatttgctggttacggtgaccgtaaggcttgatgaaacaacgcggcgagctttgatcaacgaccttttggaaacttcggcttcccctggagagagcgagattctccgcgctgtagaagtcaccattgttgtgcacgacgacatcattccgtggcgttatccagctaagcgcgaactgcaatttggagaatggcagcgcaatgacattcttgcaggtatcttcgagccagccacgatcgacattgatctggctatcttgctgacaaaagcaagagaacatagcgttgccttggtaggtccagcggcggaggaactctttgatccggttcctgaacaggatctatttgaggcgctaaatgaaaccttaacgctatggaactcgccgcccgactgggctggcgatgagcgaaatgtagtgcttacgttgtcccgcatttggtacagcgcagtaaccggcaaaatcgcgccgaaggatgtcgctgccgactgggcaatggagcgcctgccggcccagtatcagcccgtcatacttgaagctaggcaggcttatcttggacaagaagatcgcttggcctcgcgcgcagatcagttggaagaatttgttcactacgtgaaaggcgagatcaccaaggtagtcggcaaataatcactagaccaatgttacacatatatactttagattgatttaaaacttcatttttaatttaaaaggatctaggtgaagatcctttttgataatctcatgaccaaaatcccttaacgtgagttttcgttccactgagcgtcagaccccgtagaaaagatcaaaggatcttcttgagatcctttttttctgcgcgtaatctgctgcttgcaaacaaaaaaaccaccgctaccagcggtggtttgtttgccggatcaagagctaccaactcttcttccgaaggtaactggcttcagcagagcgcagataccaaatactgttcttctagtgtagccgtagttaggccaccacttcaagaactctgtagcaccgcctacatacctcgctctgctaatcctgttaccagtggctgctgccagtggcgataagtcgtgtcttaccgggttggactcaagacgatagttaccggataaggcgcagcggtcgggctgaacggggggttcgtgcacacagcccagcttggagcgaacgacctacaccgaactgagatacctacagcgtgagctatgagaaagcgccacgcttcccgaagggagaaaggcggacaggtatccggtaagcggcagggtcggaacaggagagcgcacgagggagcttccagggggaaacgcctggtatctttatagtcctgtcgggtttcgccacctctgacttgagcgtcgatttttgtgatgctcgtcaggggggcggagcctatggaaaaacgccagcaacgcggcctttttacggttcctggccttttgctggccttttgctcacatgagatctcaaacaaacacatacagcgacttagtttacccgccaatatatcctgtcaaggctcgaactaggctcggacgaagtaagcggccgcaaccttaattaaacacggcgcgccaacagcgatcgcaccaggtacc

SEQ ID NO: 313 - DNA, 7670 bp, synthetic construct
  source 1..7670: mol_type = other DNA; note = pAGS-0043 PAR promoter
acctgctgcaggacgcaatggaggattatcaccgcaaaaatgaacttcgaaaaaaactttcgagcgaccatggaaaaggaggatcagattcagattacaacagtggattgctctggtagcaaatatcttctgctagattggctcaacagtattcagtcgactggtaccaacaggctatggaagacgccaaaaacataaagaaaggcccggcgccattctatccgctggaagatggaaccgctggagagcaactgcataaggctatgaagagatacgccctggttcctggaacaattgcttttacagatgcacatatcgaggtggacatcacttacgctgagtacttcgaaatgtccgttcggttggcagaagctatgaaacgatatgggctgaatacaaatcacagaatcgtcgtatgcagtgaaaactctcttcaattctttatgccggtgttgggcgcgttatttatcggagttgcagttgcgcccgcgaacgacatttataatgaacgtgaattgctcaacagtatgggcatttcgcagcctaccgtggtgttcgtttccaaaaaggggttgcaaaaaattttgaacgtgcaaaaaaagctcccaatcatccaaaaaattattatcatggattctaaaacggattaccagggatttcagtcgatgtacacgttcgtcacatctcatctacctcccggttttaatgaatacgattttgtgccagagtccttcgatagggacaagacaattgcactgatcatgaactcctctggatctactggtctgcctaaaggtgtcgctctgcctcatagaactgcctgcgtgagattctcgcatgccagagatcctatttttggcaatcaaatcattccggatactgcgattttaagtgttgttccattccatcacggttttggaatgtttactacactcggatatttgatatgtggatttcgagtcgtcttaatgtatagatttgaagaagagctgtttctgaggagccttcaggattacaagattcaaagtgcgctgctggtgccaaccctattctccttcttcgccaaaagcactctgattgacaaatacgatttatctaatttacacgaaattgcttctggtggcgctcccctctctaaggaagtcggggaagcggttgccaagaggttccatctgccaggtatcaggcaaggatatgggctcactgagactacatcagctattctgattacacccgagggggatgataaaccgggcgcggtcggtaaagttgttccattttttgaagcgaaggttgtggatctggataccgggaaaacgctgggcgttaatcaaagaggcgaactgtgtgtgagaggtcctatgattatgtccggttatgtaaacaatccggaagcgaccaacgccttgattgacaaggatggatggctacattctggagacatagcttactgggacgaagacgaacacttcttcatcgttgaccgcctgaagtctctgattaagtacaaaggctatcaggtggctcccgctgaattggaatccatcttgctccaacaccccaacatcttcgacgcaggtgtcgcaggtcttcccgacgatgacgccggtgaacttcccgccgccgttgttgttttggagcacggaaagacgatgacggaaaaagagatcgtggattacgtcgccagtcaagtaacaaccgcgaaaaagttgcgcggaggagttgtgtttgtggacgaagtaccgaaaggtcttaccggaaaactcgacgcaagaaaaatcagagagatcctcataaaggccaagaagggcggaaagatcgccgtgtcaggtggatcctagataacctttaccttcattccctgtaaattggtaccctgcaaagctttcgttcgtatcatcggtttcgacaacgttcgtcaagttcaatgcatcagtttcattgcgcacacaccagaatcctactgagtttgagtattatggcattgggaaaactgtttttcttgtaccatttgttgtgcttgtaatttactgtgttttttattcggttttcgctatcgaactgtgaaatggaaatggatggagaagagttaatgaatgatatggtccttttgttcattctcaaattaatattatttgttttttctcttatttgttgtgtgttgaatttgaaattataagagatatgcaaacattttgttttgagtaaaaatgtgtcaaatcgtggcctctaatgaccgaagttaatatgaggagtaaaacacttgtagttgtaccattatgcttattcactaggcaacaaatatattttcagacctagaaaagctgcaaatgttactgaatacaagtatgtcctcttgtgttttagacatttatgaactttcctttatgtaattttccagaatccttgtcagattctaatcattgctttataattatagttatactcatggatttgtagttgagtatgaaaatattttttaatgcattttatgacttgccaattgattgacaacatgcatcaatcgactagtcgacgagtcagtaataaacggcgtcaaagtggttgcagccggcacacacgagtcgtgtttatcaactcaaagcacaaatacttttcctcaacctaaaaataaggcaattagccaaaaacaactttgcgtgtaaacaacgctcaatacacgtgtcattttattattagctattgcttcaccgccttagctttctcgtgacctagtcgtcctcgtcttttcttcttcttcttctataaaacaatacccaaagagctcttcttcttcacaattcagatttcaatttctcaaaatcttaaaaactttctctcaattctctctaccgtgatcaaggtaaatttctgtgttccttattctctcaaaatcttcgattttgttttcgttcgatcccaatttcgtatatgttctttggtttagattctgttaatcttagatcgaagacgattttctgggtttgatcgttagatatcatcttaattctcgattagggtttcatagatatcatccgatttgttcaaataatttgagttttgtcgaataattactcttcgatttgtgatttctatctagatctggtgttagtttctagtttgtgcgatcgaatttgtagattaatctgagtttttctgattaacaccacaccaatctggtaccagaaaaggggagaagcaaaaccatgggtaaaaagcctgaactcaccgcgacgtctgtcgagaagtttctgatcgaaaagttcgacagcgtctccgacctgatgcagctctcggagggcgaagaatctcgtgctttcagcttcgatgtaggagggcgtggatatgtcctgcgggtaaatagctgcgccgatggtttctacaaagatcgttatgtttatcggcactttgcatcggccgcgctcccgattccggaagtgcttgacattggggcattcagcgagagcctgacctattgcatctcccgccgtgcacagggtgtcacgttgcaagacctgcctgaaaccgaactgcccgctgttctgcaaccggtcgcggaggcgatggatgccatcgctgcggccgatcttagccagacgagcgggttcggcccattcggaccgcaaggaatcggtcaatacactacatggcgtgatttcatatgcgcgattgctgatccccatgtgtatcactggcaaactgtgatggacgacaccgtcagtgcgtccgtcgcgcaggctctcgatgagctgatgctttgggccgaggactgccccgaagtccggcacctcgtgcacgcggatttcggctccaacaatgtcctgacggacaatggccgcataacagcggtcattgactggagcgaggcgatgttcggggattcccaatacgaggtcgccaacatcttcttctggaggccgtggttggcttgtatggagcagcagacgcgctacttcgagcggaggcatccggagcttgcaggatcgccgcggctccgggcgtatatgctccgcattggtcttgaccaactctatcagagcttggttgacggcaatttcgatgatgcagcttgggcgcagggtcgatgcgacgcaatcgtccgatccggagccgggactgtcgggcgtacacaaatcgcccgcagaagcgcggccgtctggaccgatggctgtgtagaagtactcgccgatagtggaaaccgacgccccagcactcgtccgagggcaaaggaatagatgcatcctgctttaatgagatatgcgagacgcctatgatcgcatgatatttgctttcaattctgttgtgcacgttgtaaaaaacctgagcatgtgtagctcagatccttaccgccggtttcggttcattctaatgaatatatcacccgttactatcgtatttttatgaataatattctccgttcaatttactgattgtaccctactacttatatgtacaatattaaaatgaaaacaatatattgtgctgaataggtttatagcgacatctatgatagagcgccacaataacaaacaattgcgttttattattacaaatccaattttaaaaaaagcggcagaaccggtcaaacctaaaagactgattacataaatcttattcaaatttcaaaagtgccccaggggctagtatctacgacacaccgagcggcgaactaataacgctcactgaagggaactccggttccccgccggcgcgcatgggtgagattccttgaagttgagtattggccgtccgctctaccgaaagttacgggcaccattcaacccggtccagcacggcggccgggtaaccgacttgctgccccgagaattatgcagcatttttttggtgtatgtgggccccaaatgaagtgcaggtcaaaccttgacagtgacgacaaatcgttgggcgggtccagggcgaattttgcgacaacatgtcgaggctcagcaggaccggcatgcaagctagcttactagtgatattctatagtgtcacctaaatgtattctagaccaagcatgcacagctggcgttctcagccagatccaacgttacaccacaatatatcctgccaagatctaattccggggatcggaaatccagaagcccgagaggttgccgcctttcgggctttttctttttcaaaaaaaaaaatttataaaacgatctgttgcggccggccgccgggttgtgggcaaaggcgctcgacggtgggcaaccgcttgcggttgtccacgggcggagccggtgcgcgtagcgcattgtccacaagccaagggcgaccaataattgatatatatattcataattgaaaagctaattgaacatactacttgctgtaactacttgccggagcgaggggtgtttgcaagctgttgatctgaaagggctattagcgttctcacgtgcctttttgattagcgatttcacgtgaccttattagcgatttcacgtactccgattagcgatttcacgtaccctgattagcgatttcacgtggatagtttttggagcgggccggaaagccccgtgaatcaaggctttgcggggcattagcggtttcacgtggataactaccctctatccacaggcttccggggataaaaaagcccgctcgacggcgggctgttggatggggatcgcctgaatcgccccatcatccagccagaaagtgagggagccacggttgatgagagctttgttgtaggtggaccagttggtgattttgaacttttgctttgccacggaacggtctgcgttgtcgggaagatgcgtgatctgatccttcaactcagcaaaagttcgatttattcaacaaagccacgttgtgtctcaaaatctctgatgttacattgcacaagataaaaatatatcatcatgaacaataaaactgtctgcttacataaacagtaatacaaggggtgttatgagggaagcggtgatcgccgaagtatcgactcaactatcagaggtagttggcgtcatcgagcgccatctcgaaccgacgttgctggccgtacatttgtacggctccgcagtggatggcggcctgaagccacacagtgatattgatttgctggttacggtgaccgtaaggcttgatgaaacaacgcggcgagctttgatcaacgaccttttggaaacttcggcttcccctggagagagcgagattctccgcgctgtagaagtcaccattgttgtgcacgacgacatcattccgtggcgttatccagctaagcgcgaactgcaatttggagaatggcagcgcaatgacattcttgcaggtatcttcgagccagccacgatcgacattgatctggctatcttgctgacaaaagcaagagaacatagcgttgccttggtaggtccagcggcggaggaactctttgatccggttcctgaacaggatctatttgaggcgctaaatgaaaccttaacgctatggaactcgccgcccgactgggctggcgatgagcgaaatgtagtgcttacgttgtcccgcatttggtacagcgcagtaaccggcaaaatcgcgccgaaggatgtcgctgccgactgggcaatggagcgcctgccggcccagtatcagcccgtcatacttgaagctaggcaggcttatcttggacaagaagatcgcttggcctcgcgcgcagatcagttggaagaatttgttcactacgtgaaaggcgagatcaccaaggtagtcggcaaataatcactagaccaatgttacacatatatactttagattgatttaaaacttcatttttaatttaaaaggatctaggtgaagatcctttttgataatctcatgaccaaaatcccttaacgtgagttttcgttccactgagcgtcagaccccgtagaaaagatcaaaggatcttcttgagatcctttttttctgcgcgtaatctgctgcttgcaaacaaaaaaaccaccgctaccagcggtggtttgtttgccggatcaagagctaccaactcttcttccgaaggtaactggcttcagcagagcgcagataccaaatactgttcttctagtgtagccgtagttaggccaccacttcaagaactctgtagcaccgcctacatacctcgctctgctaatcctgttaccagtggctgctgccagtggcgataagtcgtgtcttaccgggttggactcaagacgatagttaccggataaggcgcagcggtcgggctgaacggggggttcgtgcacacagcccagcttggagcgaacgacctacaccgaactgagatacctacagcgtgagctatgagaaagcgccacgcttcccgaagggagaaaggcggacaggtatccggtaagcggcagggtcggaacaggagagcgcacgagggagcttccagggggaaacgcctggtatctttatagtcctgtcgggtttcgccacctctgacttgagcgtcgatttttgtgatgctcgtcaggggggcggagcctatggaaaaacgccagcaacgcggcctttttacggttcctggccttttgctggccttttgctcacatgagatctcaaacaaacacatacagcgacttagtttacccgccaatatatcctgtcaaggctcgaactaggctcggacgaagtaagcggccgcaaccttaattaaacacggcgcgccaacagcgatcgcaccaggtacc

SEQ ID NO: 314 - DNA, 7793 bp, synthetic construct
  source 1..7793: mol_type = other DNA; note = pAGS-0044 Cv PAS D promoter
acctactacgttagagcgctaacgagaatacttcatataccgtattttttacgataataataatgtaatgtgaaattgctatccaaaaggcacctaattttgtccaccgttcaaaggaaaggacaaggaagtagtagcgtgtaggtttggtgctgtacaaaataagcaagacacgtgttgccttattataggataatccataaggcaatttcgtcttaagtcggccattgcacctttaaaaggagcctctttgttcccaaaatcttcaacagtattcagtcgactggtaccaacaggctatggaagacgccaaaaacataaagaaaggcccggcgccattctatccgctggaagatggaaccgctggagagcaactgcataaggctatgaagagatacgccctggttcctggaacaattgcttttacagatgcacatatcgaggtggacatcacttacgctgagtacttcgaaatgtccgttcggttggcagaagctatgaaacgatatgggctgaatacaaatcacagaatcgtcgtatgcagtgaaaactctcttcaattctttatgccggtgttgggcgcgttatttatcggagttgcagttgcgcccgcgaacgacatttataatgaacgtgaattgctcaacagtatgggcatttcgcagcctaccgtggtgttcgtttccaaaaaggggttgcaaaaaattttgaacgtgcaaaaaaagctcccaatcatccaaaaaattattatcatggattctaaaacggattaccagggatttcagtcgatgtacacgttcgtcacatctcatctacctcccggttttaatgaatacgattttgtgccagagtccttcgatagggacaagacaattgcactgatcatgaactcctctggatctactggtctgcctaaaggtgtcgctctgcctcatagaactgcctgcgtgagattctcgcatgccagagatcctatttttggcaatcaaatcattccggatactgcgattttaagtgttgttccattccatcacggttttggaatgtttactacactcggatatttgatatgtggatttcgagtcgtcttaatgtatagatttgaagaagagctgtttctgaggagccttcaggattacaagattcaaagtgcgctgctggtgccaaccctattctccttcttcgccaaaagcactctgattgacaaatacgatttatctaatttacacgaaattgcttctggtggcgctcccctctctaaggaagtcggggaagcggttgccaagaggttccatctgccaggtatcaggcaaggatatgggctcactgagactacatcagctattctgattacacccgagggggatgataaaccgggcgcggtcggtaaagttgttccattttttgaagcgaaggttgtggatctggataccgggaaaacgctgggcgttaatcaaagaggcgaactgtgtgtgagaggtcctatgattatgtccggttatgtaaacaatccggaagcgaccaacgccttgattgacaaggatggatggctacattctggagacatagcttactgggacgaagacgaacacttcttcatcgttgaccgcctgaagtctctgattaagtacaaaggctatcaggtggctcccgctgaattggaatccatcttgctccaacaccccaacatcttcgacgcaggtgtcgcaggtcttcccgacgatgacgccggtgaacttcccgccgccgttgttgttttggagcacggaaagacgatgacggaaaaagagatcgtggattacgtcgccagtcaagtaacaaccgcgaaaaagttgcgcggaggagttgtgtttgtggacgaagtaccgaaaggtcttaccggaaaactcgacgcaagaaaaatcagagagatcctcataaaggccaagaagggcggaaagatcgccgtgtcaggtggatcctagataacctttaccttcattccctgtaaattggtaccctgcaaagctttcgttcgtatcatcggtttcgacaacgttcgtcaagttcaatgcatcagtttcattgcgcacacaccagaatcctactgagtttgagtattatggcattgggaaaactgtttttcttgtaccatttgttgtgcttgtaatttactgtgttttttattcggttttcgctatcgaactgtgaaatggaaatggatggagaagagttaatgaatgatatggtccttttgttcattctcaaattaatattatttgttttttctcttatttgttgtgtgttgaatttgaaattataagagatatgcaaacattttgttttgagtaaaaatgtgtcaaatcgtggcctctaatgaccgaagttaatatgaggagtaaaacacttgtagttgtaccattatgcttattcactaggcaacaaatatattttcagacctagaaaagctgcaaatgttactgaatacaagtatgtcctcttgtgttttagacatttatgaactttcctttatgtaattttccagaatccttgtcagattctaatcattgctttataattatagttatactcatggatttgtagttgagtatgaaaatattttttaatgcattttatgacttgccaattgattgacaacatgcatcaatcgactagtcgacgagtcagtaataaacggcgtcaaagtggttgcagccggcacacacgagtcgtgtttatcaactcaaagcacaaatacttttcctcaacctaaaaataaggcaattagccaaaaacaactttgcgtgtaaacaacgctcaatacacgtgtcattttattattagctattgcttcaccgccttagctttctcgtgacctagtcgtcctcgtcttttcttcttcttcttctataaaacaatacccaaagagctcttcttcttcacaattcagatttcaatttctcaaaatcttaaaaactttctctcaattctctctaccgtgatcaaggtaaatttctgtgttccttattctctcaaaatcttcgattttgttttcgttcgatcccaatttcgtatatgttctttggtttagattctgttaatcttagatcgaagacgattttctgggtttgatcgttagatatcatcttaattctcgattagggtttcatagatatcatccgatttgttcaaataatttgagttttgtcgaataattactcttcgatttgtgatttctatctagatctggtgttagtttctagtttgtgcgatcgaatttgtagattaatctgagtttttctgattaacaccacaccaatctggtaccagaaaaggggagaagcaaaaccatgggtaaaaagcctgaactcaccgcgacgtctgtcgagaagtttctgatcgaaaagttcgacagcgtctccgacctgatgcagctctcggagggcgaagaatctcgtgctttcagcttcgatgtaggagggcgtggatatgtcctgcgggtaaatagctgcgccgatggtttctacaaagatcgttatgtttatcggcactttgcatcggccgcgctcccgattccggaagtgcttgacattggggcattcagcgagagcctgacctattgcatctcccgccgtgcacagggtgtcacgttgcaagacctgcctgaaaccgaactgcccgctgttctgcaaccggtcgcggaggcgatggatgccatcgctgcggccgatcttagccagacgagcgggttcggcccattcggaccgcaaggaatcggtcaatacactacatggcgtgatttcatatgcgcgattgctgatccccatgtgtatcactggcaaactgtgatggacgacaccgtcagtgcgtccgtcgcgcaggctctcgatgagctgatgctttgggccgaggactgccccgaagtccggcacctcgtgcacgcggatttcggctccaacaatgtcctgacggacaatggccgcataacagcggtcattgactggagcgaggcgatgttcggggattcccaatacgaggtcgccaacatcttcttctggaggccgtggttggcttgtatggagcagcagacgcgctacttcgagcggaggcatccggagcttgcaggatcgccgcggctccgggcgtatatgctccgcattggtcttgaccaactctatcagagcttggttgacggcaatttcgatgatgcagcttgggcgcagggtcgatgcgacgcaatcgtccgatccggagccgggactgtcgggcgtacacaaatcgcccgcagaagcgcggccgtctggaccgatggctgtgtagaagtactcgccgatagtggaaaccgacgccccagcactcgtccgagggcaaaggaatagatgcatcctgctttaatgagatatgcgagacgcctatgatcgcatgatatttgctttcaattctgttgtgcacgttgtaaaaaacctgagcatgtgtagctcagatccttaccgccggtttcggttcattctaatgaatatatcacccgttactatcgtatttttatgaataatattctccgttcaatttactgattgtaccctactacttatatgtacaatattaaaatgaaaacaatatattgtgctgaataggtttatagcgacatctatgatagagcgccacaataacaaacaattgcgttttattattacaaatccaattttaaaaaaagcggcagaaccggtcaaacctaaaagactgattacataaatcttattcaaatttcaaaagtgccccaggggctagtatctacgacacaccgagcggcgaactaataacgctcactgaagggaactccggttccccgccggcgcgcatgggtgagattccttgaagttgagtattggccgtccgctctaccgaaagttacgggcaccattcaacccggtccagcacggcggccgggtaaccgacttgctgccccgagaattatgcagcatttttttggtgtatgtgggccccaaatgaagtgcaggtcaaaccttgacagtgacgacaaatcgttgggcgggtccagggcgaattttgcgacaacatgtcgaggctcagcaggaccggcatgcaagctagcttactagtgatattctatagtgtcacctaaatgtattctagaccaagcatgcacagctggcgttctcagccagatccaacgttacaccacaatatatcctgccaagatctaattccggggatcggaaatccagaagcccgagaggttgccgcctttcgggctttttctttttcaaaaaaaaaaatttataaaacgatctgttgcggccggccgccgggttgtgggcaaaggcgctcgacggtgggcaaccgcttgcggttgtccacgggcggagccggtgcgcgtagcgcattgtccacaagccaagggcgaccaataattgatatatatattcataattgaaaagctaattgaacatactacttgctgtaactacttgccggagcgaggggtgtttgcaagctgttgatctgaaagggctattagcgttctcacgtgcctttttgattagcgatttcacgtgaccttattagcgatttcacgtactccgattagcgatttcacgtaccctgattagcgatttcacgtggatagtttttggagcgggccggaaagccccgtgaatcaaggctttgcggggcattagcggtttcacgtggataactaccctctatccacaggcttccggggataaaaaagcccgctcgacggcgggctgttggatggggatcgcctgaatcgccccatcatccagccagaaagtgagggagccacggttgatgagagctttgttgtaggtggaccagttggtgattttgaacttttgctttgccacggaacggtctgcgttgtcgggaagatgcgtgatctgatccttcaactcagcaaaagttcgatttattcaacaaagccacgttgtgtctcaaaatctctgatgttacattgcacaagataaaaatatatcatcatgaacaataaaactgtctgcttacataaacagtaatacaaggggtgttatgagggaagcggtgatcgccgaagtatcgactcaactatcagaggtagttggcgtcatcgagcgccatctcgaaccgacgttgctggccgtacatttgtacggctccgcagtggatggcggcctgaagccacacagtgatattgatttgctggttacggtgaccgtaaggcttgatgaaacaacgcggcgagctttgatcaacgaccttttggaaacttcggcttcccctggagagagcgagattctccgcgctgtagaagtcaccattgttgtgcacgacgacatcattccgtggcgttatccagctaagcgcgaactgcaatttggagaatggcagcgcaatgacattcttgcaggtatcttcgagccagccacgatcgacattgatctggctatcttgctgacaaaagcaagagaacatagcgttgccttggtaggtccagcggcggaggaactctttgatccggttcctgaacaggatctatttgaggcgctaaatgaaaccttaacgctatggaactcgccgcccgactgggctggcgatgagcgaaatgtagtgcttacgttgtcccgcatttggtacagcgcagtaaccggcaaaatcgcgccgaaggatgtcgctgccgactgggcaatggagcgcctgccggcccagtatcagcccgtcatacttgaagctaggcaggcttatcttggacaagaagatcgcttggcctcgcgcgcagatcagttggaagaatttgttcactacgtgaaaggcgagatcaccaaggtagtcggcaaataatcactagaccaatgttacacatatatactttagattgatttaaaacttcatttttaatttaaaaggatctaggtgaagatcctttttgataatctcatgaccaaaatcccttaacgtgagttttcgttccactgagcgtcagaccccgtagaaaagatcaaaggatcttcttgagatcctttttttctgcgcgtaatctgctgcttgcaaacaaaaaaaccaccgctaccagcggtggtttgtttgccggatcaagagctaccaactcttcttccgaaggtaactggcttcagcagagcgcagataccaaatactgttcttctagtgtagccgtagttaggccaccacttcaagaactctgtagcaccgcctacatacctcgctctgctaatcctgttaccagtggctgctgccagtggcgataagtcgtgtcttaccgggttggactcaagacgatagttaccggataaggcgcagcggtcgggctgaacggggggttcgtgcacacagcccagcttggagcgaacgacctacaccgaactgagatacctacagcgtgagctatgagaaagcgccacgcttcccgaagggagaaaggcggacaggtatccggtaagcggcagggtcggaacaggagagcgcacgagggagcttccagggggaaacgcctggtatctttatagtcctgtcgggtttcgccacctctgacttgagcgtcgatttttgtgatgctcgtcaggggggcggagcctatggaaaaacgccagcaacgcggcctttttacggttcctggccttttgctggccttttgctcacatgagatctcaaacaaacacatacagcgacttagtttacccgccaatatatcctgtcaaggctcgaactaggctcggacgaagtaagcggccgcaaccttaattaaacacggcgcgccaacagcgatcgcaccaggtacc

SEQ ID NO: 315 - DNA, 7928 bp, synthetic construct
  source 1..7928: mol_type = other DNA; note = pAGS-0045 CMV promoter
acctcctactccaaaaatgtcaaagatacagtctcagaagaccaaagggctattgagacttttcaacaaagggtaatatcgggaaacctcctcggattccattgcccagctatctgtcacttcatcaaaaggacagtagaaaaggaaggtggcacctacaaatgccatcattgcgataaaggaaaggctatcgttcaagatgcccctgccgacagtggtcccaaagatggacccccacccacgaggagcatcgtggaaaaagaagacgttccaaccacgtcttcaaagcaagtggattgatgtgatatctccactgacgtaagggatgacgcacaatcccactatccttcgcaagacccttcctctatataaggaagttcatttcatttggagaggacagccaacagtattcagtcgactggtaccaacaggctatggaagacgccaaaaacataaagaaaggcccggcgccattctatccgctggaagatggaaccgctggagagcaactgcataaggctatgaagagatacgccctggttcctggaacaattgcttttacagatgcacatatcgaggtggacatcacttacgctgagtacttcgaaatgtccgttcggttggcagaagctatgaaacgatatgggctgaatacaaatcacagaatcgtcgtatgcagtgaaaactctcttcaattctttatgccggtgttgggcgcgttatttatcggagttgcagttgcgcccgcgaacgacatttataatgaacgtgaattgctcaacagtatgggcatttcgcagcctaccgtggtgttcgtttccaaaaaggggttgcaaaaaattttgaacgtgcaaaaaaagctcccaatcatccaaaaaattattatcatggattctaaaacggattaccagggatttcagtcgatgtacacgttcgtcacatctcatctacctcccggttttaatgaatacgattttgtgccagagtccttcgatagggacaagacaattgcactgatcatgaactcctctggatctactggtctgcctaaaggtgtcgctctgcctcatagaactgcctgcgtgagattctcgcatgccagagatcctatttttggcaatcaaatcattccggatactgcgattttaagtgttgttccattccatcacggttttggaatgtttactacactcggatatttgatatgtggatttcgagtcgtcttaatgtatagatttgaagaagagctgtttctgaggagccttcaggattacaagattcaaagtgcgctgctggtgccaaccctattctccttcttcgccaaaagcactctgattgacaaatacgatttatctaatttacacgaaattgcttctggtggcgctcccctctctaaggaagtcggggaagcggttgccaagaggttccatctgccaggtatcaggcaaggatatgggctcactgagactacatcagctattctgattacacccgagggggatgataaaccgggcgcggtcggtaaagttgttccattttttgaagcgaaggttgtggatctggataccgggaaaacgctgggcgttaatcaaagaggcgaactgtgtgtgagaggtcctatgattatgtccggttatgtaaacaatccggaagcgaccaacgccttgattgacaaggatggatggctacattctggagacatagcttactgggacgaagacgaacacttcttcatcgttgaccgcctgaagtctctgattaagtacaaaggctatcaggtggctcccgctgaattggaatccatcttgctccaacaccccaacatcttcgacgcaggtgtcgcaggtcttcccgacgatgacgccggtgaacttcccgccgccgttgttgttttggagcacggaaagacgatgacggaaaaagagatcgtggattacgtcgccagtcaagtaacaaccgcgaaaaagttgcgcggaggagttgtgtttgtggacgaagtaccgaaaggtcttaccggaaaactcgacgcaagaaaaatcagagagatcctcataaaggccaagaagggcggaaagatcgccgtgtcaggtggatcctagataacctttaccttcattccctgtaaattggtaccctgcaaagctttcgttcgtatcatcggtttcgacaacgttcgtcaagttcaatgcatcagtttcattgcgcacacaccagaatcctactgagtttgagtattatggcattgggaaaactgtttttcttgtaccatttgttgtgcttgtaatttactgtgttttttattcggttttcgctatcgaactgtgaaatggaaatggatggagaagagttaatgaatgatatggtccttttgttcattctcaaattaatattatttgttttttctcttatttgttgtgtgttgaatttgaaattataagagatatgcaaacattttgttttgagtaaaaatgtgtcaaatcgtggcctctaatgaccgaagttaatatgaggagtaaaacacttgtagttgtaccattatgcttattcactaggcaacaaatatattttcagacctagaaaagctgcaaatgttactgaatacaagtatgtcctcttgtgttttagacatttatgaactttcctttatgtaattttccagaatccttgtcagattctaatcattgctttataattatagttatactcatggatttgtagttgagtatgaaaatattttttaatgcattttatgacttgccaattgattgacaacatgcatcaatcgactagtcgacgagtcagtaataaacggcgtcaaagtggttgcagccggcacacacgagtcgtgtttatcaactcaaagcacaaatacttttcctcaacctaaaaataaggcaattagccaaaaacaactttgcgtgtaaacaacgctcaatacacgtgtcattttattattagctattgcttcaccgccttagctttctcgtgacctagtcgtcctcgtcttttcttcttcttcttctataaaacaatacccaaagagctcttcttcttcacaattcagatttcaatttctcaaaatcttaaaaactttctctcaattctctctaccgtgatcaaggtaaatttctgtgttccttattctctcaaaatcttcgattttgttttcgttcgatcccaatttcgtatatgttctttggtttagattctgttaatcttagatcgaagacgattttctgggtttgatcgttagatatcatcttaattctcgattagggtttcatagatatcatccgatttgttcaaataatttgagttttgtcgaataattactcttcgatttgtgatttctatctagatctggtgttagtttctagtttgtgcgatcgaatttgtagattaatctgagtttttctgattaacaccacaccaatctggtaccagaaaaggggagaagcaaaaccatgggtaaaaagcctgaactcaccgcgacgtctgtcgagaagtttctgatcgaaaagttcgacagcgtctccgacctgatgcagctctcggagggcgaagaatctcgtgctttcagcttcgatgtaggagggcgtggatatgtcctgcgggtaaatagctgcgccgatggtttctacaaagatcgttatgtttatcggcactttgcatcggccgcgctcccgattccggaagtgcttgacattggggcattcagcgagagcctgacctattgcatctcccgccgtgcacagggtgtcacgttgcaagacctgcctgaaaccgaactgcccgctgttctgcaaccggtcgcggaggcgatggatgccatcgctgcggccgatcttagccagacgagcgggttcggcccattcggaccgcaaggaatcggtcaatacactacatggcgtgatttcatatgcgcgattgctgatccccatgtgtatcactggcaaactgtgatggacgacaccgtcagtgcgtccgtcgcgcaggctctcgatgagctgatgctttgggccgaggactgccccgaagtccggcacctcgtgcacgcggatttcggctccaacaatgtcctgacggacaatggccgcataacagcggtcattgactggagcgaggcgatgttcggggattcccaatacgaggtcgccaacatcttcttctggaggccgtggttggcttgtatggagcagcagacgcgctacttcgagcggaggcatccggagcttgcaggatcgccgcggctccgggcgtatatgctccgcattggtcttgaccaactctatcagagcttggttgacggcaatttcgatgatgcagcttgggcgcagggtcgatgcgacgcaatcgtccgatccggagccgggactgtcgggcgtacacaaatcgcccgcagaagcgcggccgtctggaccgatggctgtgtagaagtactcgccgatagtggaaaccgacgccccagcactcgtccgagggcaaaggaatagatgcatcctgctttaatgagatatgcgagacgcctatgatcgcatgatatttgctttcaattctgttgtgcacgttgtaaaaaacctgagcatgtgtagctcagatccttaccgccggtttcggttcattctaatgaatatatcacccgttactatcgtatttttatgaataatattctccgttcaatttactgattgtaccctactacttatatgtacaatattaaaatgaaaacaatatattgtgctgaataggtttatagcgacatctatgatagagcgccacaataacaaacaattgcgttttattattacaaatccaattttaaaaaaagcggcagaaccggtcaaacctaaaagactgattacataaatcttattcaaatttcaaaagtgccccaggggctagtatctacgacacaccgagcggcgaactaataacgctcactgaagggaactccggttccccgccggcgcgcatgggtgagattccttgaagttgagtattggccgtccgctctaccgaaagttacgggcaccattcaacccggtccagcacggcggccgggtaaccgacttgctgccccgagaattatgcagcatttttttggtgtatgtgggccccaaatgaagtgcaggtcaaaccttgacagtgacgacaaatcgttgggcgggtccagggcgaattttgcgacaacatgtcgaggctcagcaggaccggcatgcaagctagcttactagtgatattctatagtgtcacctaaatgtattctagaccaagcatgcacagctggcgttctcagccagatccaacgttacaccacaatatatcctgccaagatctaattccggggatcggaaatccagaagcccgagaggttgccgcctttcgggctttttctttttcaaaaaaaaaaatttataaaacgatctgttgcggccggccgccgggttgtgggcaaaggcgctcgacggtgggcaaccgcttgcggttgtccacgggcggagccggtgcgcgtagcgcattgtccacaagccaagggcgaccaataattgatatatatattcataattgaaaagctaattgaacatactacttgctgtaactacttgccggagcgaggggtgtttgcaagctgttgatctgaaagggctattagcgttctcacgtgcctttttgattagcgatttcacgtgaccttattagcgatttcacgtactccgattagcgatttcacgtaccctgattagcgatttcacgtggatagtttttggagcgggccggaaagccccgtgaatcaaggctttgcggggcattagcggtttcacgtggataactaccctctatccacaggcttccggggataaaaaagcccgctcgacggcgggctgttggatggggatcgcctgaatcgccccatcatccagccagaaagtgagggagccacggttgatgagagctttgttgtaggtggaccagttggtgattttgaacttttgctttgccacggaacggtctgcgttgtcgggaagatgcgtgatctgatccttcaactcagcaaaagttcgatttattcaacaaagccacgttgtgtctcaaaatctctgatgttacattgcacaagataaaaatatatcatcatgaacaataaaactgtctgcttacataaacagtaatacaaggggtgttatgagggaagcggtgatcgccgaagtatcgactcaactatcagaggtagttggcgtcatcgagcgccatctcgaaccgacgttgctggccgtacatttgtacggctccgcagtggatggcggcctgaagccacacagtgatattgatttgctggttacggtgaccgtaaggcttgatgaaacaacgcggcgagctttgatcaacgaccttttggaaacttcggcttcccctggagagagcgagattctccgcgctgtagaagtcaccattgttgtgcacgacgacatcattccgtggcgttatccagctaagcgcgaactgcaatttggagaatggcagcgcaatgacattcttgcaggtatcttcgagccagccacgatcgacattgatctggctatcttgctgacaaaagcaagagaacatagcgttgccttggtaggtccagcggcggaggaactctttgatccggttcctgaacaggatctatttgaggcgctaaatgaaaccttaacgctatggaactcgccgcccgactgggctggcgatgagcgaaatgtagtgcttacgttgtcccgcatttggtacagcgcagtaaccggcaaaatcgcgccgaaggatgtcgctgccgactgggcaatggagcgcctgccggcccagtatcagcccgtcatacttgaagctaggcaggcttatcttggacaagaagatcgcttggcctcgcgcgcagatcagttggaagaatttgttcactacgtgaaaggcgagatcaccaaggtagtcggcaaataatcactagaccaatgttacacatatatactttagattgatttaaaacttcatttttaatttaaaaggatctaggtgaagatcctttttgataatctcatgaccaaaatcccttaacgtgagttttcgttccactgagcgtcagaccccgtagaaaagatcaaaggatcttcttgagatcctttttttctgcgcgtaatctgctgcttgcaaacaaaaaaaccaccgctaccagcggtggtttgtttgccggatcaagagctaccaactcttcttccgaaggtaactggcttcagcagagcgcagataccaaatactgttcttctagtgtagccgtagttaggccaccacttcaagaactctgtagcaccgcctacatacctcgctctgctaatcctgttaccagtggctgctgccagtggcgataagtcgtgtcttaccgggttggactcaagacgatagttaccggataaggcgcagcggtcgggctgaacggggggttcgtgcacacagcccagcttggagcgaacgacctacaccgaactgagatacctacagcgtgagctatgagaaagcgccacgcttcccgaagggagaaaggcggacaggtatccggtaagcggcagggtcggaacaggagagcgcacgagggagcttccagggggaaacgcctggtatctttatagtcctgtcgggtttcgccacctctgacttgagcgtcgatttttgtgatgctcgtcaggggggcggagcctatggaaaaacgccagcaacgcggcctttttacggttcctggccttttgctggccttttgctcacatgagatctcaaacaaacacatacagcgacttagtttacccgccaatatatcctgtcaaggctcgaactaggctcggacgaagtaagcggccgcaaccttaattaaacacggcgcgccaacagcgatcgcaccaggtacc

SEQ ID NO: 316 - DNA, 7954 bp, synthetic construct
  source 1..7954: mol_type = other DNA; note = pAGS-0046 CMV promoter+ enhancer
acctgtgtaatgtattggtaatttgggaagatataataggaagcaaggctatttatccatttctgaaaaggcgaaatggcgtcaccgcgagcgtcacgcgcattccgttcttgctgtaaagcgttgtttggtacacttttgactagcgaggcttggcgtgtcagcgtatctattcaaaagtcgttaatggctgcggatcaagaaaaagttggaatagaaacagaatacccgcgaaattcaggcccggttgccatgtcctacacgccgaaataaacgaccaaattagtagaaaaataaaaactgactcggatacttacgtcacgtcttgcgcactgatttgaaaaatctcaatataaacaaagacggccacaagaaaaaaccaaaacaccgatattcattaatcttatctagtttctcaaaaaaatcataacagtattcagtcgactggtaccaacaggctatggaagacgccaaaaacataaagaaaggcccggcgccattctatccgctggaagatggaaccgctggagagcaactgcataaggctatgaagagatacgccctggttcctggaacaattgcttttacagatgcacatatcgaggtggacatcacttacgctgagtacttcgaaatgtccgttcggttggcagaagctatgaaacgatatgggctgaatacaaatcacagaatcgtcgtatgcagtgaaaactctcttcaattctttatgccggtgttgggcgcgttatttatcggagttgcagttgcgcccgcgaacgacatttataatgaacgtgaattgctcaacagtatgggcatttcgcagcctaccgtggtgttcgtttccaaaaaggggttgcaaaaaattttgaacgtgcaaaaaaagctcccaatcatccaaaaaattattatcatggattctaaaacggattaccagggatttcagtcgatgtacacgttcgtcacatctcatctacctcccggttttaatgaatacgattttgtgccagagtccttcgatagggacaagacaattgcactgatcatgaactcctctggatctactggtctgcctaaaggtgtcgctctgcctcatagaactgcctgcgtgagattctcgcatgccagagatcctatttttggcaatcaaatcattccggatactgcgattttaagtgttgttccattccatcacggttttggaatgtttactacactcggatatttgatatgtggatttcgagtcgtcttaatgtatagatttgaagaagagctgtttctgaggagccttcaggattacaagattcaaagtgcgctgctggtgccaaccctattctccttcttcgccaaaagcactctgattgacaaatacgatttatctaatttacacgaaattgcttctggtggcgctcccctctctaaggaagtcggggaagcggttgccaagaggttccatctgccaggtatcaggcaaggatatgggctcactgagactacatcagctattctgattacacccgagggggatgataaaccgggcgcggtcggtaaagttgttccattttttgaagcgaaggttgtggatctggataccgggaaaacgctgggcgttaatcaaagaggcgaactgtgtgtgagaggtcctatgattatgtccggttatgtaaacaatccggaagcgaccaacgccttgattgacaaggatggatggctacattctggagacatagcttactgggacgaagacgaacacttcttcatcgttgaccgcctgaagtctctgattaagtacaaaggctatcaggtggctcccgctgaattggaatccatcttgctccaacaccccaacatcttcgacgcaggtgtcgcaggtcttcccgacgatgacgccggtgaacttcccgccgccgttgttgttttggagcacggaaagacgatgacggaaaaagagatcgtggattacgtcgccagtcaagtaacaaccgcgaaaaagttgcgcggaggagttgtgtttgtggacgaagtaccgaaaggtcttaccggaaaactcgacgcaagaaaaatcagagagatcctcataaaggccaagaagggcggaaagatcgccgtgtcaggtggatcctagataacctttaccttcattccctgtaaattggtaccctgcaaagctttcgttcgtatcatcggtttcgacaacgttcgtcaagttcaatgcatcagtttcattgcgcacacaccagaatcctactgagtttgagtattatggcattgggaaaactgtttttcttgtaccatttgttgtgcttgtaatttactgtgttttttattcggttttcgctatcgaactgtgaaatggaaatggatggagaagagttaatgaatgatatggtccttttgttcattctcaaattaatattatttgttttttctcttatttgttgtgtgttgaatttgaaattataagagatatgcaaacattttgttttgagtaaaaatgtgtcaaatcgtggcctctaatgaccgaagttaatatgaggagtaaaacacttgtagttgtaccattatgcttattcactaggcaacaaatatattttcagacctagaaaagctgcaaatgttactgaatacaagtatgtcctcttgtgttttagacatttatgaactttcctttatgtaattttccagaatccttgtcagattctaatcattgctttataattatagttatactcatggatttgtagttgagtatgaaaatattttttaatgcattttatgacttgccaattgattgacaacatgcatcaatcgactagtcgacgagtcagtaataaacggcgtcaaagtggttgcagccggcacacacgagtcgtgtttatcaactcaaagcacaaatacttttcctcaacctaaaaataaggcaattagccaaaaacaactttgcgtgtaaacaacgctcaatacacgtgtcattttattattagctattgcttcaccgccttagctttctcgtgacctagtcgtcctcgtcttttcttcttcttcttctataaaacaatacccaaagagctcttcttcttcacaattcagatttcaatttctcaaaatcttaaaaactttctctcaattctctctaccgtgatcaaggtaaatttctgtgttccttattctctcaaaatcttcgattttgttttcgttcgatcccaatttcgtatatgttctttggtttagattctgttaatcttagatcgaagacgattttctgggtttgatcgttagatatcatcttaattctcgattagggtttcatagatatcatccgatttgttcaaataatttgagttttgtcgaataattactcttcgatttgtgatttctatctagatctggtgttagtttctagtttgtgcgatcgaatttgtagattaatctgagtttttctgattaacaccacaccaatctggtaccagaaaaggggagaagcaaaaccatgggtaaaaagcctgaactcaccgcgacgtctgtcgagaagtttctgatcgaaaagttcgacagcgtctccgacctgatgcagctctcggagggcgaagaatctcgtgctttcagcttcgatgtaggagggcgtggatatgtcctgcgggtaaatagctgcgccgatggtttctacaaagatcgttatgtttatcggcactttgcatcggccgcgctcccgattccggaagtgcttgacattggggcattcagcgagagcctgacctattgcatctcccgccgtgcacagggtgtcacgttgcaagacctgcctgaaaccgaactgcccgctgttctgcaaccggtcgcggaggcgatggatgccatcgctgcggccgatcttagccagacgagcgggttcggcccattcggaccgcaaggaatcggtcaatacactacatggcgtgatttcatatgcgcgattgctgatccccatgtgtatcactggcaaactgtgatggacgacaccgtcagtgcgtccgtcgcgcaggctctcgatgagctgatgctttgggccgaggactgccccgaagtccggcacctcgtgcacgcggatttcggctccaacaatgtcctgacggacaatggccgcataacagcggtcattgactggagcgaggcgatgttcggggattcccaatacgaggtcgccaacatcttcttctggaggccgtggttggcttgtatggagcagcagacgcgctacttcgagcggaggcatccggagcttgcaggatcgccgcggctccgggcgtatatgctccgcattggtcttgaccaactctatcagagcttggttgacggcaatttcgatgatgcagcttgggcgcagggtcgatgcgacgcaatcgtccgatccggagccgggactgtcgggcgtacacaaatcgcccgcagaagcgcggccgtctggaccgatggctgtgtagaagtactcgccgatagtggaaaccgacgccccagcactcgtccgagggcaaaggaatagatgcatcctgctttaatgagatatgcgagacgcctatgatcgcatgatatttgctttcaattctgttgtgcacgttgtaaaaaacctgagcatgtgtagctcagatccttaccgccggtttcggttcattctaatgaatatatcacccgttactatcgtatttttatgaataatattctccgttcaatttactgattgtaccctactacttatatgtacaatattaaaatgaaaacaatatattgtgctgaataggtttatagcgacatctatgatagagcgccacaataacaaacaattgcgttttattattacaaatccaattttaaaaaaagcggcagaaccggtcaaacctaaaagactgattacataaatcttattcaaatttcaaaagtgccccaggggctagtatctacgacacaccgagcggcgaactaataacgctcactgaagggaactccggttccccgccggcgcgcatgggtgagattccttgaagttgagtattggccgtccgctctaccgaaagttacgggcaccattcaacccggtccagcacggcggccgggtaaccgacttgctgccccgagaattatgcagcatttttttggtgtatgtgggccccaaatgaagtgcaggtcaaaccttgacagtgacgacaaatcgttgggcgggtccagggcgaattttgcgacaacatgtcgaggctcagcaggaccggcatgcaagctagcttactagtgatattctatagtgtcacctaaatgtattctagaccaagcatgcacagctggcgttctcagccagatccaacgttacaccacaatatatcctgccaagatctaattccggggatcggaaatccagaagcccgagaggttgccgcctttcgggctttttctttttcaaaaaaaaaaatttataaaacgatctgttgcggccggccgccgggttgtgggcaaaggcgctcgacggtgggcaaccgcttgcggttgtccacgggcggagccggtgcgcgtagcgcattgtccacaagccaagggcgaccaataattgatatatatattcataattgaaaagctaattgaacatactacttgctgtaactacttgccggagcgaggggtgtttgcaagctgttgatctgaaagggctattagcgttctcacgtgcctttttgattagcgatttcacgtgaccttattagcgatttcacgtactccgattagcgatttcacgtaccctgattagcgatttcacgtggatagtttttggagcgggccggaaagccccgtgaatcaaggctttgcggggcattagcggtttcacgtggataactaccctctatccacaggcttccggggataaaaaagcccgctcgacggcgggctgttggatggggatcgcctgaatcgccccatcatccagccagaaagtgagggagccacggttgatgagagctttgttgtaggtggaccagttggtgattttgaacttttgctttgccacggaacggtctgcgttgtcgggaagatgcgtgatctgatccttcaactcagcaaaagttcgatttattcaacaaagccacgttgtgtctcaaaatctctgatgttacattgcacaagataaaaatatatcatcatgaacaataaaactgtctgcttacataaacagtaatacaaggggtgttatgagggaagcggtgatcgccgaagtatcgactcaactatcagaggtagttggcgtcatcgagcgccatctcgaaccgacgttgctggccgtacatttgtacggctccgcagtggatggcggcctgaagccacacagtgatattgatttgctggttacggtgaccgtaaggcttgatgaaacaacgcggcgagctttgatcaacgaccttttggaaacttcggcttcccctggagagagcgagattctccgcgctgtagaagtcaccattgttgtgcacgacgacatcattccgtggcgttatccagctaagcgcgaactgcaatttggagaatggcagcgcaatgacattcttgcaggtatcttcgagccagccacgatcgacattgatctggctatcttgctgacaaaagcaagagaacatagcgttgccttggtaggtccagcggcggaggaactctttgatccggttcctgaacaggatctatttgaggcgctaaatgaaaccttaacgctatggaactcgccgcccgactgggctggcgatgagcgaaatgtagtgcttacgttgtcccgcatttggtacagcgcagtaaccggcaaaatcgcgccgaaggatgtcgctgccgactgggcaatggagcgcctgccggcccagtatcagcccgtcatacttgaagctaggcaggcttatcttggacaagaagatcgcttggcctcgcgcgcagatcagttggaagaatttgttcactacgtgaaaggcgagatcaccaaggtagtcggcaaataatcactagaccaatgttacacatatatactttagattgatttaaaacttcatttttaatttaaaaggatctaggtgaagatcctttttgataatctcatgaccaaaatcccttaacgtgagttttcgttccactgagcgtcagaccccgtagaaaagatcaaaggatcttcttgagatcctttttttctgcgcgtaatctgctgcttgcaaacaaaaaaaccaccgctaccagcggtggtttgtttgccggatcaagagctaccaactcttcttccgaaggtaactggcttcagcagagcgcagataccaaatactgttcttctagtgtagccgtagttaggccaccacttcaagaactctgtagcaccgcctacatacctcgctctgctaatcctgttaccagtggctgctgccagtggcgataagtcgtgtcttaccgggttggactcaagacgatagttaccggataaggcgcagcggtcgggctgaacggggggttcgtgcacacagcccagcttggagcgaacgacctacaccgaactgagatacctacagcgtgagctatgagaaagcgccacgcttcccgaagggagaaaggcggacaggtatccggtaagcggcagggtcggaacaggagagcgcacgagggagcttccagggggaaacgcctggtatctttatagtcctgtcgggtttcgccacctctgacttgagcgtcgatttttgtgatgctcgtcaggggggcggagcctatggaaaaacgccagcaacgcggcctttttacggttcctggccttttgctggccttttgctcacatgagatctcaaacaaacacatacagcgacttagtttacccgccaatatatcctgtcaaggctcgaactaggctcggacgaagtaagcggccgcaaccttaattaaacacggcgcgccaacagcgatcgcaccaggtacc

SEQ ID NO: 317 - DNA, 8023 bp, synthetic construct
  source 1..8023: mol_type = other DNA; note = pAGS-0047 SV40 promoter
acctgctgaggcttgacatgattggtgcgtatgtttgtatgaagctacaggactgatttggcgggctatgagggcgggggaagctctggaagggccgcgatggggcgcgcggcgtccagaaggcgccatacggcccgctggcggcacccatccggtataaaagcccgcgaccccgaacggtgacctccactttcagcgacaaacgagcacttatacatacgcgactattctgccgctatacataaccactcagctagcttaagatcccatcaagcttgcatgccgggcgcgccagaaggagcgcagccaaaccaggatgatgtttgatggggtatttgagcacttgcaacccttatccggaagccccctggcccacaaaggctaggcgccaatgcaagcagttcgcatgcagcccctggagcggtgccctcctgataaaccggccagggggcctatgttctttacttttttacaagagaagtcactcaacatcttaaaacagtattcagtcgactggtaccaacaggctatggaagacgccaaaaacataaagaaaggcccggcgccattctatccgctggaagatggaaccgctggagagcaactgcataaggctatgaagagatacgccctggttcctggaacaattgcttttacagatgcacatatcgaggtggacatcacttacgctgagtacttcgaaatgtccgttcggttggcagaagctatgaaacgatatgggctgaatacaaatcacagaatcgtcgtatgcagtgaaaactctcttcaattctttatgccggtgttgggcgcgttatttatcggagttgcagttgcgcccgcgaacgacatttataatgaacgtgaattgctcaacagtatgggcatttcgcagcctaccgtggtgttcgtttccaaaaaggggttgcaaaaaattttgaacgtgcaaaaaaagctcccaatcatccaaaaaattattatcatggattctaaaacggattaccagggatttcagtcgatgtacacgttcgtcacatctcatctacctcccggttttaatgaatacgattttgtgccagagtccttcgatagggacaagacaattgcactgatcatgaactcctctggatctactggtctgcctaaaggtgtcgctctgcctcatagaactgcctgcgtgagattctcgcatgccagagatcctatttttggcaatcaaatcattccggatactgcgattttaagtgttgttccattccatcacggttttggaatgtttactacactcggatatttgatatgtggatttcgagtcgtcttaatgtatagatttgaagaagagctgtttctgaggagccttcaggattacaagattcaaagtgcgctgctggtgccaaccctattctccttcttcgccaaaagcactctgattgacaaatacgatttatctaatttacacgaaattgcttctggtggcgctcccctctctaaggaagtcggggaagcggttgccaagaggttccatctgccaggtatcaggcaaggatatgggctcactgagactacatcagctattctgattacacccgagggggatgataaaccgggcgcggtcggtaaagttgttccattttttgaagcgaaggttgtggatctggataccgggaaaacgctgggcgttaatcaaagaggcgaactgtgtgtgagaggtcctatgattatgtccggttatgtaaacaatccggaagcgaccaacgccttgattgacaaggatggatggctacattctggagacatagcttactgggacgaagacgaacacttcttcatcgttgaccgcctgaagtctctgattaagtacaaaggctatcaggtggctcccgctgaattggaatccatcttgctccaacaccccaacatcttcgacgcaggtgtcgcaggtcttcccgacgatgacgccggtgaacttcccgccgccgttgttgttttggagcacggaaagacgatgacggaaaaagagatcgtggattacgtcgccagtcaagtaacaaccgcgaaaaagttgcgcggaggagttgtgtttgtggacgaagtaccgaaaggtcttaccggaaaactcgacgcaagaaaaatcagagagatcctcataaaggccaagaagggcggaaagatcgccgtgtcaggtggatcctagataacctttaccttcattccctgtaaattggtaccctgcaaagctttcgttcgtatcatcggtttcgacaacgttcgtcaagttcaatgcatcagtttcattgcgcacacaccagaatcctactgagtttgagtattatggcattgggaaaactgtttttcttgtaccatttgttgtgcttgtaatttactgtgttttttattcggttttcgctatcgaactgtgaaatggaaatggatggagaagagttaatgaatgatatggtccttttgttcattctcaaattaatattatttgttttttctcttatttgttgtgtgttgaatttgaaattataagagatatgcaaacattttgttttgagtaaaaatgtgtcaaatcgtggcctctaatgaccgaagttaatatgaggagtaaaacacttgtagttgtaccattatgcttattcactaggcaacaaatatattttcagacctagaaaagctgcaaatgttactgaatacaagtatgtcctcttgtgttttagacatttatgaactttcctttatgtaattttccagaatccttgtcagattctaatcattgctttataattatagttatactcatggatttgtagttgagtatgaaaatattttttaatgcattttatgacttgccaattgattgacaacatgcatcaatcgactagtcgacgagtcagtaataaacggcgtcaaagtggttgcagccggcacacacgagtcgtgtttatcaactcaaagcacaaatacttttcctcaacctaaaaataaggcaattagccaaaaacaactttgcgtgtaaacaacgctcaatacacgtgtcattttattattagctattgcttcaccgccttagctttctcgtgacctagtcgtcctcgtcttttcttcttcttcttctataaaacaatacccaaagagctcttcttcttcacaattcagatttcaatttctcaaaatcttaaaaactttctctcaattctctctaccgtgatcaaggtaaatttctgtgttccttattctctcaaaatcttcgattttgttttcgttcgatcccaatttcgtatatgttctttggtttagattctgttaatcttagatcgaagacgattttctgggtttgatcgttagatatcatcttaattctcgattagggtttcatagatatcatccgatttgttcaaataatttgagttttgtcgaataattactcttcgatttgtgatttctatctagatctggtgttagtttctagtttgtgcgatcgaatttgtagattaatctgagtttttctgattaacaccacaccaatctggtaccagaaaaggggagaagcaaaaccatgggtaaaaagcctgaactcaccgcgacgtctgtcgagaagtttctgatcgaaaagttcgacagcgtctccgacctgatgcagctctcggagggcgaagaatctcgtgctttcagcttcgatgtaggagggcgtggatatgtcctgcgggtaaatagctgcgccgatggtttctacaaagatcgttatgtttatcggcactttgcatcggccgcgctcccgattccggaagtgcttgacattggggcattcagcgagagcctgacctattgcatctcccgccgtgcacagggtgtcacgttgcaagacctgcctgaaaccgaactgcccgctgttctgcaaccggtcgcggaggcgatggatgccatcgctgcggccgatcttagccagacgagcgggttcggcccattcggaccgcaaggaatcggtcaatacactacatggcgtgatttcatatgcgcgattgctgatccccatgtgtatcactggcaaactgtgatggacgacaccgtcagtgcgtccgtcgcgcaggctctcgatgagctgatgctttgggccgaggactgccccgaagtccggcacctcgtgcacgcggatttcggctccaacaatgtcctgacggacaatggccgcataacagcggtcattgactggagcgaggcgatgttcggggattcccaatacgaggtcgccaacatcttcttctggaggccgtggttggcttgtatggagcagcagacgcgctacttcgagcggaggcatccggagcttgcaggatcgccgcggctccgggcgtatatgctccgcattggtcttgaccaactctatcagagcttggttgacggcaatttcgatgatgcagcttgggcgcagggtcgatgcgacgcaatcgtccgatccggagccgggactgtcgggcgtacacaaatcgcccgcagaagcgcggccgtctggaccgatggctgtgtagaagtactcgccgatagtggaaaccgacgccccagcactcgtccgagggcaaaggaatagatgcatcctgctttaatgagatatgcgagacgcctatgatcgcatgatatttgctttcaattctgttgtgcacgttgtaaaaaacctgagcatgtgtagctcagatccttaccgccggtttcggttcattctaatgaatatatcacccgttactatcgtatttttatgaataatattctccgttcaatttactgattgtaccctactacttatatgtacaatattaaaatgaaaacaatatattgtgctgaataggtttatagcgacatctatgatagagcgccacaataacaaacaattgcgttttattattacaaatccaattttaaaaaaagcggcagaaccggtcaaacctaaaagactgattacataaatcttattcaaatttcaaaagtgccccaggggctagtatctacgacacaccgagcggcgaactaataacgctcactgaagggaactccggttccccgccggcgcgcatgggtgagattccttgaagttgagtattggccgtccgctctaccgaaagttacgggcaccattcaacccggtccagcacggcggccgggtaaccgacttgctgccccgagaattatgcagcatttttttggtgtatgtgggccccaaatgaagtgcaggtcaaaccttgacagtgacgacaaatcgttgggcgggtccagggcgaattttgcgacaacatgtcgaggctcagcaggaccggcatgcaagctagcttactagtgatattctatagtgtcacctaaatgtattctagaccaagcatgcacagctggcgttctcagccagatccaacgttacaccacaatatatcctgccaagatctaattccggggatcggaaatccagaagcccgagaggttgccgcctttcgggctttttctttttcaaaaaaaaaaatttataaaacgatctgttgcggccggccgccgggttgtgggcaaaggcgctcgacggtgggcaaccgcttgcggttgtccacgggcggagccggtgcgcgtagcgcattgtccacaagccaagggcgaccaataattgatatatatattcataattgaaaagctaattgaacatactacttgctgtaactacttgccggagcgaggggtgtttgcaagctgttgatctgaaagggctattagcgttctcacgtgcctttttgattagcgatttcacgtgaccttattagcgatttcacgtactccgattagcgatttcacgtaccctgattagcgatttcacgtggatagtttttggagcgggccggaaagccccgtgaatcaaggctttgcggggcattagcggtttcacgtggataactaccctctatccacaggcttccggggataaaaaagcccgctcgacggcgggctgttggatggggatcgcctgaatcgccccatcatccagccagaaagtgagggagccacggttgatgagagctttgttgtaggtggaccagttggtgattttgaacttttgctttgccacggaacggtctgcgttgtcgggaagatgcgtgatctgatccttcaactcagcaaaagttcgatttattcaacaaagccacgttgtgtctcaaaatctctgatgttacattgcacaagataaaaatatatcatcatgaacaataaaactgtctgcttacataaacagtaatacaaggggtgttatgagggaagcggtgatcgccgaagtatcgactcaactatcagaggtagttggcgtcatcgagcgccatctcgaaccgacgttgctggccgtacatttgtacggctccgcagtggatggcggcctgaagccacacagtgatattgatttgctggttacggtgaccgtaaggcttgatgaaacaacgcggcgagctttgatcaacgaccttttggaaacttcggcttcccctggagagagcgagattctccgcgctgtagaagtcaccattgttgtgcacgacgacatcattccgtggcgttatccagctaagcgcgaactgcaatttggagaatggcagcgcaatgacattcttgcaggtatcttcgagccagccacgatcgacattgatctggctatcttgctgacaaaagcaagagaacatagcgttgccttggtaggtccagcggcggaggaactctttgatccggttcctgaacaggatctatttgaggcgctaaatgaaaccttaacgctatggaactcgccgcccgactgggctggcgatgagcgaaatgtagtgcttacgttgtcccgcatttggtacagcgcagtaaccggcaaaatcgcgccgaaggatgtcgctgccgactgggcaatggagcgcctgccggcccagtatcagcccgtcatacttgaagctaggcaggcttatcttggacaagaagatcgcttggcctcgcgcgcagatcagttggaagaatttgttcactacgtgaaaggcgagatcaccaaggtagtcggcaaataatcactagaccaatgttacacatatatactttagattgatttaaaacttcatttttaatttaaaaggatctaggtgaagatcctttttgataatctcatgaccaaaatcccttaacgtgagttttcgttccactgagcgtcagaccccgtagaaaagatcaaaggatcttcttgagatcctttttttctgcgcgtaatctgctgcttgcaaacaaaaaaaccaccgctaccagcggtggtttgtttgccggatcaagagctaccaactcttcttccgaaggtaactggcttcagcagagcgcagataccaaatactgttcttctagtgtagccgtagttaggccaccacttcaagaactctgtagcaccgcctacatacctcgctctgctaatcctgttaccagtggctgctgccagtggcgataagtcgtgtcttaccgggttggactcaagacgatagttaccggataaggcgcagcggtcgggctgaacggggggttcgtgcacacagcccagcttggagcgaacgacctacaccgaactgagatacctacagcgtgagctatgagaaagcgccacgcttcccgaagggagaaaggcggacaggtatccggtaagcggcagggtcggaacaggagagcgcacgagggagcttccagggggaaacgcctggtatctttatagtcctgtcgggtttcgccacctctgacttgagcgtcgatttttgtgatgctcgtcaggggggcggagcctatggaaaaacgccagcaacgcggcctttttacggttcctggccttttgctggccttttgctcacatgagatctcaaacaaacacatacagcgacttagtttacccgccaatatatcctgtcaaggctcgaactaggctcggacgaagtaagcggccgcaaccttaattaaacacggcgcgccaacagcgatcgcaccaggtacc

SEQ ID NO: 318 - DNA, 8351 bp, synthetic construct
  source 1..8351: mol_type = other DNA; note = pAGS-0048 SV40 promoter +enhancer
acctgatcccacacacctgcccgtctgcctgacaggaagtgaacgcatgtcgagggaggcctcaccaatcgtcacacgagccctcgtcagaaacacgtctccgccacgctctccctctcactgccgaccccgcagcccttttgccctttcctaggccaccgacaggacccaggcgctctcagcatgcctcaacaacccgtactcgtgccagcggtgcccttgtgctggtgatcgcttggaagcgcatgcgaagacgaaggggcggagcaggcggcctggctgttcgaagggctcgccgccagttcgggtgcctttctccacgcgcgcctccacacctaccgatgcgtgaaggcaggcaaatgctcatgtttgcccgaactcggagtccttaaaaagccgcttcttgtcgtcgttccgagacatgttagcagatcgcagtgccacctttcctgacgcgctcggccccatattcggacgcaattgtcatttgtagcacaattggagcaaatctggcgaggcagtaggcttttaagttgcaaggcgagagagcaaagtgggacgcggcgtgattattggtatttacgcgacggcccggcgcgttagcggcccttcccccaggccagggacgattatgtatcaatattgttgcgttcgggcactcgtgcgagggctcctgcgggctggggagggggatctgggaattggaggtacgaccgagatggcttgctcggggggaggtttcctcgccgagcaagccagggttaggtgttgcgctcttgactcgttgtgcattctaggaccccactgctactcacaacaagccaaaacagtattcagtcgactggtaccaacaggctatggaagacgccaaaaacataaagaaaggcccggcgccattctatccgctggaagatggaaccgctggagagcaactgcataaggctatgaagagatacgccctggttcctggaacaattgcttttacagatgcacatatcgaggtggacatcacttacgctgagtacttcgaaatgtccgttcggttggcagaagctatgaaacgatatgggctgaatacaaatcacagaatcgtcgtatgcagtgaaaactctcttcaattctttatgccggtgttgggcgcgttatttatcggagttgcagttgcgcccgcgaacgacatttataatgaacgtgaattgctcaacagtatgggcatttcgcagcctaccgtggtgttcgtttccaaaaaggggttgcaaaaaattttgaacgtgcaaaaaaagctcccaatcatccaaaaaattattatcatggattctaaaacggattaccagggatttcagtcgatgtacacgttcgtcacatctcatctacctcccggttttaatgaatacgattttgtgccagagtccttcgatagggacaagacaattgcactgatcatgaactcctctggatctactggtctgcctaaaggtgtcgctctgcctcatagaactgcctgcgtgagattctcgcatgccagagatcctatttttggcaatcaaatcattccggatactgcgattttaagtgttgttccattccatcacggttttggaatgtttactacactcggatatttgatatgtggatttcgagtcgtcttaatgtatagatttgaagaagagctgtttctgaggagccttcaggattacaagattcaaagtgcgctgctggtgccaaccctattctccttcttcgccaaaagcactctgattgacaaatacgatttatctaatttacacgaaattgcttctggtggcgctcccctctctaaggaagtcggggaagcggttgccaagaggttccatctgccaggtatcaggcaaggatatgggctcactgagactacatcagctattctgattacacccgagggggatgataaaccgggcgcggtcggtaaagttgttccattttttgaagcgaaggttgtggatctggataccgggaaaacgctgggcgttaatcaaagaggcgaactgtgtgtgagaggtcctatgattatgtccggttatgtaaacaatccggaagcgaccaacgccttgattgacaaggatggatggctacattctggagacatagcttactgggacgaagacgaacacttcttcatcgttgaccgcctgaagtctctgattaagtacaaaggctatcaggtggctcccgctgaattggaatccatcttgctccaacaccccaacatcttcgacgcaggtgtcgcaggtcttcccgacgatgacgccggtgaacttcccgccgccgttgttgttttggagcacggaaagacgatgacggaaaaagagatcgtggattacgtcgccagtcaagtaacaaccgcgaaaaagttgcgcggaggagttgtgtttgtggacgaagtaccgaaaggtcttaccggaaaactcgacgcaagaaaaatcagagagatcctcataaaggccaagaagggcggaaagatcgccgtgtcaggtggatcctagataacctttaccttcattccctgtaaattggtaccctgcaaagctttcgttcgtatcatcggtttcgacaacgttcgtcaagttcaatgcatcagtttcattgcgcacacaccagaatcctactgagtttgagtattatggcattgggaaaactgtttttcttgtaccatttgttgtgcttgtaatttactgtgttttttattcggttttcgctatcgaactgtgaaatggaaatggatggagaagagttaatgaatgatatggtccttttgttcattctcaaattaatattatttgttttttctcttatttgttgtgtgttgaatttgaaattataagagatatgcaaacattttgttttgagtaaaaatgtgtcaaatcgtggcctctaatgaccgaagttaatatgaggagtaaaacacttgtagttgtaccattatgcttattcactaggcaacaaatatattttcagacctagaaaagctgcaaatgttactgaatacaagtatgtcctcttgtgttttagacatttatgaactttcctttatgtaattttccagaatccttgtcagattctaatcattgctttataattatagttatactcatggatttgtagttgagtatgaaaatattttttaatgcattttatgacttgccaattgattgacaacatgcatcaatcgactagtcgacgagtcagtaataaacggcgtcaaagtggttgcagccggcacacacgagtcgtgtttatcaactcaaagcacaaatacttttcctcaacctaaaaataaggcaattagccaaaaacaactttgcgtgtaaacaacgctcaatacacgtgtcattttattattagctattgcttcaccgccttagctttctcgtgacctagtcgtcctcgtcttttcttcttcttcttctataaaacaatacccaaagagctcttcttcttcacaattcagatttcaatttctcaaaatcttaaaaactttctctcaattctctctaccgtgatcaaggtaaatttctgtgttccttattctctcaaaatcttcgattttgttttcgttcgatcccaatttcgtatatgttctttggtttagattctgttaatcttagatcgaagacgattttctgggtttgatcgttagatatcatcttaattctcgattagggtttcatagatatcatccgatttgttcaaataatttgagttttgtcgaataattactcttcgatttgtgatttctatctagatctggtgttagtttctagtttgtgcgatcgaatttgtagattaatctgagtttttctgattaacaccacaccaatctggtaccagaaaaggggagaagcaaaaccatgggtaaaaagcctgaactcaccgcgacgtctgtcgagaagtttctgatcgaaaagttcgacagcgtctccgacctgatgcagctctcggagggcgaagaatctcgtgctttcagcttcgatgtaggagggcgtggatatgtcctgcgggtaaatagctgcgccgatggtttctacaaagatcgttatgtttatcggcactttgcatcggccgcgctcccgattccggaagtgcttgacattggggcattcagcgagagcctgacctattgcatctcccgccgtgcacagggtgtcacgttgcaagacctgcctgaaaccgaactgcccgctgttctgcaaccggtcgcggaggcgatggatgccatcgctgcggccgatcttagccagacgagcgggttcggcccattcggaccgcaaggaatcggtcaatacactacatggcgtgatttcatatgcgcgattgctgatccccatgtgtatcactggcaaactgtgatggacgacaccgtcagtgcgtccgtcgcgcaggctctcgatgagctgatgctttgggccgaggactgccccgaagtccggcacctcgtgcacgcggatttcggctccaacaatgtcctgacggacaatggccgcataacagcggtcattgactggagcgaggcgatgttcggggattcccaatacgaggtcgccaacatcttcttctggaggccgtggttggcttgtatggagcagcagacgcgctacttcgagcggaggcatccggagcttgcaggatcgccgcggctccgggcgtatatgctccgcattggtcttgaccaactctatcagagcttggttgacggcaatttcgatgatgcagcttgggcgcagggtcgatgcgacgcaatcgtccgatccggagccgggactgtcgggcgtacacaaatcgcccgcagaagcgcggccgtctggaccgatggctgtgtagaagtactcgccgatagtggaaaccgacgccccagcactcgtccgagggcaaaggaatagatgcatcctgctttaatgagatatgcgagacgcctatgatcgcatgatatttgctttcaattctgttgtgcacgttgtaaaaaacctgagcatgtgtagctcagatccttaccgccggtttcggttcattctaatgaatatatcacccgttactatcgtatttttatgaataatattctccgttcaatttactgattgtaccctactacttatatgtacaatattaaaatgaaaacaatatattgtgctgaataggtttatagcgacatctatgatagagcgccacaataacaaacaattgcgttttattattacaaatccaattttaaaaaaagcggcagaaccggtcaaacctaaaagactgattacataaatcttattcaaatttcaaaagtgccccaggggctagtatctacgacacaccgagcggcgaactaataacgctcactgaagggaactccggttccccgccggcgcgcatgggtgagattccttgaagttgagtattggccgtccgctctaccgaaagttacgggcaccattcaacccggtccagcacggcggccgggtaaccgacttgctgccccgagaattatgcagcatttttttggtgtatgtgggccccaaatgaagtgcaggtcaaaccttgacagtgacgacaaatcgttgggcgggtccagggcgaattttgcgacaacatgtcgaggctcagcaggaccggcatgcaagctagcttactagtgatattctatagtgtcacctaaatgtattctagaccaagcatgcacagctggcgttctcagccagatccaacgttacaccacaatatatcctgccaagatctaattccggggatcggaaatccagaagcccgagaggttgccgcctttcgggctttttctttttcaaaaaaaaaaatttataaaacgatctgttgcggccggccgccgggttgtgggcaaaggcgctcgacggtgggcaaccgcttgcggttgtccacgggcggagccggtgcgcgtagcgcattgtccacaagccaagggcgaccaataattgatatatatattcataattgaaaagctaattgaacatactacttgctgtaactacttgccggagcgaggggtgtttgcaagctgttgatctgaaagggctattagcgttctcacgtgcctttttgattagcgatttcacgtgaccttattagcgatttcacgtactccgattagcgatttcacgtaccctgattagcgatttcacgtggatagtttttggagcgggccggaaagccccgtgaatcaaggctttgcggggcattagcggtttcacgtggataactaccctctatccacaggcttccggggataaaaaagcccgctcgacggcgggctgttggatggggatcgcctgaatcgccccatcatccagccagaaagtgagggagccacggttgatgagagctttgttgtaggtggaccagttggtgattttgaacttttgctttgccacggaacggtctgcgttgtcgggaagatgcgtgatctgatccttcaactcagcaaaagttcgatttattcaacaaagccacgttgtgtctcaaaatctctgatgttacattgcacaagataaaaatatatcatcatgaacaataaaactgtctgcttacataaacagtaatacaaggggtgttatgagggaagcggtgatcgccgaagtatcgactcaactatcagaggtagttggcgtcatcgagcgccatctcgaaccgacgttgctggccgtacatttgtacggctccgcagtggatggcggcctgaagccacacagtgatattgatttgctggttacggtgaccgtaaggcttgatgaaacaacgcggcgagctttgatcaacgaccttttggaaacttcggcttcccctggagagagcgagattctccgcgctgtagaagtcaccattgttgtgcacgacgacatcattccgtggcgttatccagctaagcgcgaactgcaatttggagaatggcagcgcaatgacattcttgcaggtatcttcgagccagccacgatcgacattgatctggctatcttgctgacaaaagcaagagaacatagcgttgccttggtaggtccagcggcggaggaactctttgatccggttcctgaacaggatctatttgaggcgctaaatgaaaccttaacgctatggaactcgccgcccgactgggctggcgatgagcgaaatgtagtgcttacgttgtcccgcatttggtacagcgcagtaaccggcaaaatcgcgccgaaggatgtcgctgccgactgggcaatggagcgcctgccggcccagtatcagcccgtcatacttgaagctaggcaggcttatcttggacaagaagatcgcttggcctcgcgcgcagatcagttggaagaatttgttcactacgtgaaaggcgagatcaccaaggtagtcggcaaataatcactagaccaatgttacacatatatactttagattgatttaaaacttcatttttaatttaaaaggatctaggtgaagatcctttttgataatctcatgaccaaaatcccttaacgtgagttttcgttccactgagcgtcagaccccgtagaaaagatcaaaggatcttcttgagatcctttttttctgcgcgtaatctgctgcttgcaaacaaaaaaaccaccgctaccagcggtggtttgtttgccggatcaagagctaccaactcttcttccgaaggtaactggcttcagcagagcgcagataccaaatactgttcttctagtgtagccgtagttaggccaccacttcaagaactctgtagcaccgcctacatacctcgctctgctaatcctgttaccagtggctgctgccagtggcgataagtcgtgtcttaccgggttggactcaagacgatagttaccggataaggcgcagcggtcgggctgaacggggggttcgtgcacacagcccagcttggagcgaacgacctacaccgaactgagatacctacagcgtgagctatgagaaagcgccacgcttcccgaagggagaaaggcggacaggtatccggtaagcggcagggtcggaacaggagagcgcacgagggagcttccagggggaaacgcctggtatctttatagtcctgtcgggtttcgccacctctgacttgagcgtcgatttttgtgatgctcgtcaggggggcggagcctatggaaaaacgccagcaacgcggcctttttacggttcctggccttttgctggccttttgctcacatgagatctcaaacaaacacatacagcgacttagtttacccgccaatatatcctgtcaaggctcgaactaggctcggacgaagtaagcggccgcaaccttaattaaacacggcgcgccaacagcgatcgcaccaggtacc

SEQ ID NO: 319 - DNA, 20 bp, synthetic construct
  source 1..20: mol_type = other DNA; note = Left primer PCDNA3.1+1
gaccaccaagcgaaacatgg

SEQ ID NO: 320 - DNA, 20 bp, synthetic construct
  source 1..20: mol_type = other DNA; note = Right primer PCDNA3.1+1
ccatgggtcacgacgagatc

SEQ ID NO: 321 - DNA, 720 bp, synthetic construct; identical to SEQ ID NO: 10
  source 1..720: mol_type = other DNA; note = Enhanced green fluorescent protein

SEQ ID NO: 322 - RNA, 720 nt, synthetic construct; identical to SEQ ID NO: 121
  source 1..720: mol_type = other RNA; note = CleanCap EGFP coding sequence

SEQ ID NO: 323 - DNA, 2387 bp, Photinus pyralis; identical to SEQ ID NO: 11
  source 1..2387: mol_type = other DNA; note = Luciferase gene

SEQ ID NO: 324 - RNA, 25 nt, synthetic construct
  source 1..25: mol_type = other RNA; note = HIF-1a siRNA
tacgttgtgagtggaattattdtdt

SEQ ID NO: 325 - RNA, 25 nt, synthetic construct
  source 1..25: mol_type = other RNA; note = HIF-1a siRNA (antisense)
dtdtatgcaacactcaccataataa

SEQ ID NO: 326 - RNA, 22 nt, synthetic construct
  source 1..22: mol_type = other RNA; note = VEGF siRNA (sense)
tcgagaccttggtggacadtdt

SEQ ID NO: 327 - RNA, 23 nt, synthetic construct
  source 1..23: mol_type = other RNA; note = VEGF siRNA (antisense)
atgtccaccaaggtctcgadtdt

SEQ ID NO: 328 - RNA, 23 nt, synthetic construct
  source 1..23: mol_type = other RNA; note = Negative Control (NC) siRNA (sense)
ttctccgaacgtgtcacgtdtdt

SEQ ID NO: 329 - RNA, 23 nt, synthetic construct
  source 1..23: mol_type = other RNA; note = Negative Control (NC) siRNA (antisense)
acgtgacacgttcggagaadtdt

SEQ ID NO: 330 - protein, 24 aa, Homo sapiens
  source 1..24: note = AA34-58 of FKBPL (FK506 Binding Protein-Like) peptide
QIRQQPRDPPTETLELEVSPDPAS

SEQ ID NO: 331 - protein, 431 aa, Homo sapiens
  source 1..431: note = Aflibercept (VEGF Trap-Eye)
SDTGRPFVEMYSEIPEIIHMTEGRELVIPCRVTSPNITVTLKKFPLDTLIPDGKRIIWDSRKGFIISNATYKEIGLLTCEATVNGHLYKTNYLTHRQTNTIIDVVLSPSHGIELSVGEKLVLNCTARTELNVGIDFNWEYPSSKHQHKKLVNRDLKTQSGSEMKKFLSTLTIDGVTRSDQGLYTCAASSGLMTKKNSTFVRVHEKDKTHTCPPCPAPELLGGPSVFLFPPKPKDTLMISRTPEVTCVVVDVSHEDPEVKFNWYVDGVEVHNAKTKPREEQYNSTYRVVSVLTVLHQDWLNGKEYKCKVSNKALPAPIEKTISKAKGQPREPQVYTLPPSRDELTKNQVSLTCLVKGFYPSDIAVEWESNGQPENNYKTTPPVLDSDGSFFLYSKLTVDKSRWQQGNVFSCSVMHEALHNHYTQKSLSLSPG

SEQ ID NO: 332 - RNA, 1382 nt, synthetic construct
  source 1..1382: mol_type = other RNA; note = Aflibercept (VEGF Trap-Eye) coding sequence 1
gccaccatggtcagctactgggacaccggggtcctgctgtgcgcgctgctcagctgtctgcttctcacaggatctagttccggaagtgataccggtagacctttcgtagagatgtacagtgaaatcccgaaattatacacatgactgaaggaagggagctcgtcattccctgccgggttacgtcacctaacatcactgttactttaaaaaagtttccacttgacactttgatccctgatggaaaacgcataatctgggacagtagaaagggcttcatcatatcaaatgcaacgtacaaagaaatagggcttctgacctgtgaagcaacagtcaatgggcatttgtataagacaaactatctcacacatcgacaaaccaatacaatcatagatgtggttctgagtccgtctcatggaattgaactatctgttggagaaaagcttgtcttaaattgtacagcaagaactgaactaaatgtggggattgacttcaactgggaatacccttcttcgaagcatcagcataagaaacttgtaaaccgagacctaaaaacccagtctgggagtgagatgaagaaatttttgagcaccttaactatagatggtgtaacccggagtgaccaaggattgtacacctgtgcagcatccagtgggctgatgaccaagaagaacagcacatttgtcagggtccatgaaaaggacaaaactcacacatgcccaccgtgcccagcacctgaactcctggggggaccgtcagtcttcctcttccccccaaaacccaaggacaccctcatgatctcccggacccctgaggtcacatgcgtggtggtggacgtgagccacgaagaccctgaggtcaagttcaactggtacgtggacggcgtggaggtgcataatgccaagacaaagccgcgggaggagcagtacaacagcacgtaccgtgtggtcagcgtcctcaccgtcctgcaccaggactggctgaatggcaaggagtacaagtgcaaggtctccaacaaagccctcccagcccccatcgagaaaaccatctccaaagccaaagggcagccccgagaaccacaggtgtacaccctgcccccatcccgggatgagctgaccaagaaccaggtcagcctgacctgcctggtcaaaggcttctatcccagcgacatcgccgtggagtgggagagcaatgggcagccggagaacaactacaagaccacgcctcccgtgctggactccgacggctccttcttcctctacagcaagctcaccgtggacaagagcaggtggcagcaggggaacgtcttctcatgctccgtgatgcatgaggctctgcacaaccactacacgcagaagagcctctccctgtctccgggtaaatga

SEQ ID NO: 333 - RNA, 1356 nt, synthetic construct
  source 1..1356: mol_type = other RNA; note = Aflibercept (VEGF Trap-Eye) coding sequence 2
atgtacagaatgcagctgctgctgctgatcgccctgagcctggccctggtgaccaacagcagcgacaccggcagacccttcgtggagatgtacagcgagatccccgagatcatccacatgaccgagggcagagagctggtgatcccctgcagagtgaccagccccaacatcaccgtgaccctgaagaagttccccctggacaccctgatccccgacggcaagagaatcatctgggacagcagaaagggcttcatcatcagcaacgccacctacaaggagatcggcctgctgacctgcgaggccaccgtgaacggccacctgtacaagaccaactacctgacccacagacagaccaacaccatcatcgacgtggtgctgagccccagccacggcatcgagctgagcgtgggcgagaagctggtgctgaactgcaccgccagaaccgagctgaacgtgggcatcgacttcaactgggagtaccccagcagcaagcaccagcacaagaagctggtgaacagagacctgaagacccagagcggcagcgagatgaagaagttcctgagcaccctgaccatcgacggcgtgaccagaagcgaccagggcctgtacacctgcgccgccagcagcggcctgatgaccaagaagaacagcaccttcgtgagagtgcacgagaaggacaagacccacacctgccccccctgccccgcccccgagctgctgggcggccccagcgtgttcctgttcccccccaagcccaaggacaccctgatgatcagcagaacccccgaggtgacctgcgtggtggtggacgtgagccacgaggaccccgaggtgaagttcaactggtacgtggacggcgtggaggtgcacaacgccaagaccaagcccagagaggagcagtacaacagcacctacagagtggtgagcgtgctgaccgtgctgcaccaggactggctgaacggcaaggagtacaagtgcaaggtgagcaacaaggccctgcccgcccccatcgagaagaccatcagcaaggccaagggccagcccagagagccccaggtgtacaccctgccccccagcagagacgagctgaccaagaaccaggtgagcctgacctgcctggtgaagggcttctaccccagcgacatcgccgtggagtgggagagcaacggccagcccgagaacaactacaagaccaccccccccgtgctggacagcgacggcagcttcttcctgtacagcaagctgaccgtggacaagagcagatggcagcagggcaacgtgttcagctgcagcgtgatgcacgaggccctgcacaaccactacacccagaagagcctgagcctgagccccggctga

SEQ ID NO: 334 - protein, 133 aa, Homo sapiens
  source 1..133: note = Norrin (NDP)
MRKHVLAASFSMLSLLVIMGDTDSKTDSSFIMDSDPRRCMRHHYVDSISHPLYKCSSKMVLLARCEGHCSQASRSEPLVSFSTVLKQPFRSSCHCCRPQTSKLKALRLRCSGGMRLTATYRYILSCHCEECNS

SEQ ID NO: 335 - RNA, 23 nt, synthetic construct
  source 1..23: mol_type = other RNA; note = SRPK1 siRNA 1
gtggcaatgaaagtagttaaatt

SEQ ID NO: 336 - RNA, 23 nt, synthetic construct
  source 1..23: mol_type = other RNA; note = SRPK1 siRNA 2
cagactcttgtacacctataatt

SEQ ID NO: 337 - RNA, 23 nt, synthetic construct
  source 1..23: mol_type = other RNA; note = SRPK1 siRNA 3
gcagctggcttcacagatttctt

SEQ ID NO: 338 - DNA, 7714 bp, synthetic construct
  source 1..7714: mol_type = other DNA; note = pBCB-23-0041 CDS EGFP
atggtgagcaagggcgaggagctgttcaccggggtggtgcccatcctggtcgagctggacggcgacgtaaacggccacaagttcagcgtgtccggcgagggcgagggcgatgccacctacggcaagctgaccctgaagttcatctgcaccaccggcaagctgcccgtgccctggcccaccctcgtgaccaccctgacctacggcgtgcagtgcttcagccgctaccccgaccacatgaagcagcacgacttcttcaagtccgccatgcccgaaggctacgtccaggagcgcaccatcttcttcaaggacgacggcaactacaagacccgcgccgaggtgaagttcgagggcgacaccctggtgaaccgcatcgagctgaagggcatcgacttcaaggaggacggcaacatcctggggcacaagctggagtacaactacaacagccacaacgtctatatcatggccgacaagcagaagaacggcatcaaggtgaacttcaagatccgccacaacatcgaggacggcagcgtgcagctcgccgaccactaccagcagaacacccccatcggcgaggccccgtgctgctgcccgacaaccactacctgagcacccagtccgccctgagcaaagaccccaacgagaagcgcgatcacatggtcctgctggagttcgtgaccgccgccgggatcactctcggcatggacgagctgtacaagtaaagcggccgctcgaggccggcaaggccggatccagacatgataagatacattgatgagtttggacaaaccacaactagaatgcagtgaaaaaaatgctttatttgtgaaatttgtgatgctattgctttatttgtaaccattataagctgcaataaacaagttaacaacaacaattgcattcattttatgtttcaggttcagggggaggtgtgggaggttttttaaagcaagtaaaacctctacaaatgtggtatggctgattatgatccggctgcctcgcgcgtttcggtgatgacggtgaaaacctctgacacatgcagctcccggagacggtcacagcttgtctgtaagcggatgccgggagcagacaagcccgtcagggcgcgtcagcgggtgttggcgggtgtcggggcgcagccatgaggtcgactagcttggcacgccagaaatccgcgcggtggtttttgggggtcgggggtgtttggcagccacagacgcccggtgttcgtgtcgcgccagtacatgcggtccatgcccaggccatccaaaaaccatgggtctgtctgctcagtccagtcgtggacctgaccccacgcaacgcccaaaataataacccccacgaaccataaaccattccccatgggggaccccgtccctaacccacggggccagtggctatggcagggcctgccgccccgacgttggctggagccctgggccttcacccgaacttggggggtggggtggggaaaaggaagaaacgcgggcgtattggccccaatggggtctcggtggggtatcgacagagtgccagccctgggaccgaaccccgcgtttatgaacaaacgacccaacacccgtgcgttttattctgtctttttattgccgtcatagcgcgggttccttccggtattgtctccttccgtgtttcagttagcctcccccatctcccgatccggacgagtgctggggcgtcggtttccactatcggcgagtacttctacacagccatcggtccagacggccgcgcttctgcgggcgatttgtgtacgcccgacagtcccggctccggatcggacgattgcgtcgcatcgaccctgcgcccaagctgcatcatcgaaattgccgtcaaccaagctctgatagagttggtcaagaccaatgcggagcatatacgcccggagccgcggcgatcctgcaagctccggatgcctccgctcgaagtagcgcgtctgctgctccatacaagccaaccacggcctccagaagaagatgttggcgacctcgtattgggaatccccgaacatcgcctcgctccagtcaatgaccgctgttatgcggccattgtccgtcaggacattgttggagccgaaatccgcgtgcacgaggtgccggacttcggggcagtcctcggcccaaagcatcagctcatcgagagcctgcgcgacggacgcactgacggtgtcgtccatcacagtttgccagtgatacacatggggatcagcaatcgcgcatatgaaatcacgccatgtagtgtattgaccgattccttgcggtccgaatgggccgaacccgctcgtctggctaagatcggccgcagcgatcgcatccatggcctccgcgaccggctgcagaacagcgggcagttcggtttcaggcaggtcttgcaacgtgacaccctgtgcacggcgggagatgcaataggtcaggctctcgctgaattccccaagtcaagcacttccggaatcgggagcgcggccgatgcaaagtgccgataaacataacgatctttgtagaaaccatcggcgcagctatttacccgcaggacatatccacgccctcctacatcgaagctgaaagcacgagattcttcgccctccgagagctgcatcaggtcggagacgctgtcgaacttttcgatcagaaacttctcgacagacgtcgcggtgagttcaggctttttcatatctcattgccccccgggatctgcggcacgctgttgacgctgttaagcgggtcgctgcagggtcgctcggtgttcgaggccacacgcgtcaccttaatatgcgaagtggacctcggaccgcgccgccccgactgcatctgcgtgttcgattcgccaatgacaagacgctgggcggggtttgtgtcatcatagaactaaagacatgcaaatatatttcttccggggacaccgccagcaaacgcgagcaacgggccacggggatgaagcagggcggcacctcgctaacggattcaccactccaagaattggagccaatcaattcttgcggagaactgtgaatgcgcaaaccaacccttggcagaacatatccatcgcgtccgccatctccagcagccgcacgcggcgcatctcggggccgacgcgctgggctacgtcttgctggcgttcgtagagcatggctacgtagataagtagcatggcgggttaatcattaactacacagctgcattaatgaatcggccaacgcgcggggagaggcggtttgcgtattgggcgctcttccgcttcctcgctcactgactcgctgcgctcggtcgttcggctgcggcgagcggtatcagctcactcaaaggcggtaatacggttatccacagaatcaggggataacgcaggaaagaacatgtgagcaaaaggccagcaaaaggccaggaaccgtaaaaaggccgcgttgctggcgtttttccataggctccgcccccctgacgagcatcacaaaaatcgacgctcaagtcagaggtggcgaaacccgacaggactataaagataccaggcgtttccccctggaagctccctcgtgcgctctcctgttccgaccctgccgcttaccggatacctgtccgcctttctcccttcgggaagcgtggcgctttctcatagctcacgctgtaggtatctcagttcggtgtaggtcgttcgctccaagctgggctgtgtgcacgaaccccccgttcagcccgaccgctgcgccttatccggtaactatcgtcttgagtccaacccggtaagacacgacttatcgccactggcagcagccactggtaacaggattagcagagcgaggtatgtaggcggtgctacagagttcttgaagtggtggcctaactacggctacactagaagaacagtatttggtatctgcgctctgctgaagccagttaccttcggaaaaagagttggtagctcttgatccggcaaacaaaccaccgctggtagcggtggtttttttgtttgcaagcagcagattacgcgcagaaaaaaaggatctcaagaagatcctttgatcttttctacggggtctgacgctcagtggaacgaaaactcacgttaagggattttggtcatgagattatcaaaaaggatcttcacctagatccttttaaattaaaaatgaagttttaaatcaatctaaagtatatatgagtaaacttggtctgacagttaccaatgcttaatcagtgaggcacctatctcagcgatctgtctatttcgttcatccatagttgcctgactccccgtcgtgtagataactacgatacgggagggcttaccatctggccccagtgctgcaatgataccgcgagacccacgctcaccggctccagatttatcagcaataaaccagccagccggaagggccgagcgcagaagtggtcctgcaactttatccgcctccatccagtctattaattgttgccgggaagctagagtaagtagttcgccagttaatagtttgcgcaacgttgttgccattgctacaggcatcgtggtgtcacgctcgtcgtttggtatggcttcattcagctccggttcccaacgatcaaggcgagttacatgatcccccatgttgtgcaaaaaagcggttagctccttcggtcctccgatcgttgtcagaagtaagttggccgcagtgttatcactcatggttatggcagcactgcataattctcttactgtcatgccatccgtaagatgcttttctgtgactggtgagtactcaaccaagtcattctgagaatagtgtatgcggcgaccgagttgctcttgcccggcgtcaatacgggataataccgcgccacatagcagaactttaaaagtgctcatcattggaaaacgttcttcggggcgaaaactctcaaggatcttaccgctgttgagatccagttcgatgtaacccactcgtgcacccaactgatcttcagcatcttttactttcaccagcgtttctgggtgagcaaaaacaggaaggcaaaatgccgcaaaaaagggaataagggcgacacggaaatgttgaatactcatactcttcctttttcaatattattgaagcatttatcagggttattgtctcatgagcggatacatatttgaatgtatttagaaaaataaacaaataggggttccgcgcacatttccccgaaaagtgccacctgacgtctaagaaaccattattatcatgacattaacctataaaaataggcgtatcacgaggccctttcgtctcgcgcgtttcggtgatgacggtgaaaacctctgacacatgcagctcccggagacggtcacagcttgtctgtaagcggatgccgggagcagacaagcccgtcagggcgcgtcagcgggtgttggcgggtgtcggggctggcttaactatgcggcatcagagcagattgtactgagagtgcaccatatgcggtgtgaaataccgcacagatgcgtaaggagaaaataccgcatcaggcgattccaacatccaataaatcatacaggcaaggcaaagaattagcaaaattaagcaataaagcctcagagcataaagctaaatcggttgtaccaaaaacattatgaccctgtaatacttttgcgggagaagcctttatttcaacgcaaggataaaaatttttagaaccctcatatattttaaatgcaatgcctgagtaatgtgtaggtaaagattcaaacgggtgagaaaggccggagacagtcaaatcaccatcaatatgatattcaaccgttctagctgataaattcatgccggagagggtagctatttttgagaggtctctacaaaggctatcaggtcattgcctgagagtctggagcaaacaagagaatcgatgaacggtaatcgtaaaactagcatgtcaatcatatgtaccccggttgataatcagaaaagccccaaaaacaggaagattgtataagcaaatatttaaattgtaagcgttaatattttgttaaaattcgcgttaaatttttgttaaatcagctcattttttaaccaataggccgaaatcggcaaaatcccttataaatcaaaagaatagaccgagatagggttgagtgttgttccagtttggaacaagagtccactattaaagaacgtggactccaacgtcaaagggcgaaaaaccgtctatcagggcgatggcccactacgtgaaccatcaccctaatcaagttttttggggtcgaggtgccgtaaagcactaaatcggaaccctaaagggagcccccgatttagagcttgacggggaaagccggcgaacgtggcgagaaaggaagggaagaaagcgaaaggagcgggcgctagggcgctggcaagtgtagcggtcacgctgcgcgtaaccaccacacccgccgcgcttaatgcgccgctacagggcgcgtactatggttgctttgacgagcacgtataacgtgctttcctcgttagaatcagagcgggagctaaacaggaggccgattaaagggattttagacaggaacggtacgccagaatcctgagaagtgtttttataatcagtgaggccaccgagtaaaagagtctgtccatcacgcaaattaaccgttgtcgcaatacttctttgattagtaataacatcacttgcctgagtagaagaactcaaactatcggccttgctggaatatccagaacaatattaccgccagccattgcaacggaatcgccattcgccattcaggctgcgcaactgttgggaagggcgatcggtgcgggcctcttcgctattacgctgtagttaatgattaacccgccatgctacttatctacgtagccatgctctagtcgaccaattctcatgtttgacagcttatcatcgcagatccgggcaacgttgttgccattgctgcaggcgcagaactggtaggtatggaagatctatacattgaatcaatattggcaattagccatattagtcattggttatatagcataaatcaatattggctattggccattgcatacgttgtatctatatcataatatgtacatttatattggctcatgtccaatatgaccgccatgttgacattgattattgactagttattaatagtaatcaattacggggtcattagttcatagcccatatatggagttccgcgttacataacttacggtaaatggcccgcctggctgaccgcccaacgacccccgcccattgacgtcaataatgacgtatgttcccatagtaacgccaatagggactttccattgacgtcaatgggtggagtatttacggtaaactgcccacttggcagtacatcaagtgtatcatatgccaagtccgccccctattgacgtcaatgacggtaaatggcccgcctggcattatgcccagtacatgaccttacgggactttcctacttggcagtacatctacgtattagtcatcgctattaccatggtgatgcggttttggcagtacaccaatgggcgtggatagcggtttgactcacggggatttccaagtctccaccccattgacgtcaatgggagtttgttttggcaccaaaatcaacgggactttccaaaatgtcgtaataaccccgccccgttgacgcaaatgggcggtaggcgtgtacggtgggaggtctatataagcagagctcgtttagtgaaccgtcagatctctagaagctgggtaccgcgggcccgggatccatcgccacc

SEQ ID NO: 339 - DNA, 8376 bp, synthetic construct
  source 1..8376: mol_type = other DNA; note = pBCB-23-0070 CDS Aflibercept 1
gccaccatggtcagctactgggacaccggggtcctgctgtgcgcgctgctcagctgtctgcttctcacaggatctagttccggaagtgataccggtagacctttcgtagagatgtacagtgaaatcccgaaattatacacatgactgaaggaagggagctcgtcattccctgccgggttacgtcacctaacatcactgttactttaaaaaagtttccacttgacactttgatccctgatggaaaacgcataatctgggacagtagaaagggcttcatcatatcaaatgcaacgtacaaagaaatagggcttctgacctgtgaagcaacagtcaatgggcatttgtataagacaaactatctcacacatcgacaaaccaatacaatcatagatgtggttctgagtccgtctcatggaattgaactatctgttggagaaaagcttgtcttaaattgtacagcaagaactgaactaaatgtggggattgacttcaactgggaatacccttcttcgaagcatcagcataagaaacttgtaaaccgagacctaaaaacccagtctgggagtgagatgaagaaatttttgagcaccttaactatagatggtgtaacccggagtgaccaaggattgtacacctgtgcagcatccagtgggctgatgaccaagaagaacagcacatttgtcagggtccatgaaaaggacaaaactcacacatgcccaccgtgcccagcacctgaactcctggggggaccgtcagtcttcctcttccccccaaaacccaaggacaccctcatgatctcccggacccctgaggtcacatgcgtggtggtggacgtgagccacgaagaccctgaggtcaagttcaactggtacgtggacggcgtggaggtgcataatgccaagacaaagccgcgggaggagcagtacaacagcacgtaccgtgtggtcagcgtcctcaccgtcctgcaccaggactggctgaatggcaaggagtacaagtgcaaggtctccaacaaagccctcccagcccccatcgagaaaaccatctccaaagccaaagggcagccccgagaaccacaggtgtacaccctgcccccatcccgggatgagctgaccaagaaccaggtcagcctgacctgcctggtcaaaggcttctatcccagcgacatcgccgtggagtgggagagcaatgggcagccggagaacaactacaagaccacgcctcccgtgctggactccgacggctccttcttcctctacagcaagctcaccgtggacaagagcaggtggcagcaggggaacgtcttctcatgctccgtgatgcatgaggctctgcacaaccactacacgcagaagagcctctccctgtctccgggtaaatgaagcggccgctcgaggccggcaaggccggatccagacatgataagatacattgatgagtttggacaaaccacaactagaatgcagtgaaaaaaatgctttatttgtgaaatttgtgatgctattgctttatttgtaaccattataagctgcaataaacaagttaacaacaacaattgcattcattttatgtttcaggttcagggggaggtgtgggaggttttttaaagcaagtaaaacctctacaaatgtggtatggctgattatgatccggctgcctcgcgcgtttcggtgatgacggtgaaaacctctgacacatgcagctcccggagacggtcacagcttgtctgtaagcggatgccgggagcagacaagcccgtcagggcgcgtcagcgggtgttggcgggtgtcggggcgcagccatgaggtcgactagcttggcacgccagaaatccgcgcggtggtttttgggggtcgggggtgtttggcagccacagacgcccggtgttcgtgtcgcgccagtacatgcggtccatgcccaggccatccaaaaaccatgggtctgtctgctcagtccagtcgtggacctgaccccacgcaacgcccaaaataataacccccacgaaccataaaccattccccatgggggaccccgtccctaacccacggggccagtggctatggcgggcctgccgccccgacgttggctggagccctgggccttcacccgaacttggggggtggggtggggaaaaggaagaaacgcgggcgtattggccccaatggggtctcggtggggtatcgacagagtgccagccctgggaccgaaccccgcgtttatgaacaaacgacccaacacccgtgcgttttattctgtctttttattgccgtcatagcgcgggttccttccggtattgtctccttccgtgtttcagttagcctcccccatctcccgatccggacgagtgctggggcgtcggtttccactatcggcgagtacttctacacagccatcggtccagacggccgcgcttctgcgggcgatttgtgtacgcccgacagtcccggctccggatcggacgattgcgtcgcatcgaccctgcgcccaagctgcatcatcgaaattgccgtcaaccaagctctgatagagttggtcaagaccaatgcggagcatatacgcccggagccgcggcgatcctgcaagctccggatgcctccgctcgaagtagcgcgtctgctgctccatacaagccaaccacggcctccagaagaagatgttggcgacctcgtattgggaatccccgaacatcgcctcgctccagtcaatgaccgctgttatgcggccattgtccgtcaggacattgttggagccgaaatccgcgtgcacgaggtgccggacttcggggcagtcctcggcccaaagcatcagctcatcgagagcctgcgcgacggacgcactgacggtgtcgtccatcacagtttgccagtgatacacatggggatcagcaatcgcgcatatgaaatcacgccatgtagtgtattgaccgattccttgcggtccgaatgggccgaacccgctcgtctggctaagatcggccgcagcgatcgcatccatggcctccgcgaccggctgcagaacagcgggcagttcggtttcaggcaggtcttgcaacgtgacaccctgtgcacggcgggagatgcaataggtcaggctctcgctgaattccccaagtcaagcacttccggaatcgggagcgcggccgatgcaaagtgccgataaacataacgatctttgtagaaaccatcggcgcagctatttacccgcaggacatatccacgccctcctacatcgaagctgaaagcacgagattcttcgccctccgagagctgcatcaggtcggagacgctgtcgaacttttcgatcagaaacttctcgacagacgtcgcggtgagttcaggctttttcatatctcattgccccccgggatctgcggcacgctgttgacgctgttaagcgggtcgctgcagggtcgctcggtgttcgaggccacacgcgtcaccttaatatgcgaagtggacctcggaccgcgccgccccgactgcatctgcgtgttcgattcgccaatgacaagacgctgggcggggtttgtgtcatcatagaactaaagacatgcaaatatatttcttccggggacaccgccagcaaacgcgagcaacgggccacggggatgaagcagggcggcacctcgctaacggattcaccactccaagaattggagccaatcaattcttgcggagaactgtgaatgcgcaaaccaacccttggcagaacatatccatcgcgtccgccatctccagcagccgcacgcggcgcatctcggggccgacgcgctgggctacgtcttgctggcgttcgtagagcatggctacgtagataagtagcatggcgggttaatcattaactacacagctgcattaatgaatcggccaacgcgcggggagaggcggtttgcgtattgggcgctcttccgcttcctcgctcactgactcgctgcgctcggtcgttcggctgcggcgagcggtatcagctcactcaaaggcggtaatacggttatccacagaatcaggggataacgcaggaaagaacatgtgagcaaaaggccagcaaaaggccaggaaccgtaaaaaggccgcgttgctggcgtttttccataggctccgcccccctgacgagcatcacaaaaatcgacgctcaagtcagaggtggcgaaacccgacaggactataaagataccaggcgtttccccctggaagctccctcgtgcgctctcctgttccgaccctgccgcttaccggatacctgtccgcctttctcccttcgggaagcgtggcgctttctcatagctcacgctgtaggtatctcagttcggtgtaggtcgttcgctccaagctgggctgtgtgcacgaaccccccgttcagcccgaccgctgcgccttatccggtaactatcgtcttgagtccaacccggtaagacacgacttatcgccactggcagcagccactggtaacaggattagcagagcgaggtatgtaggcggtgctacagagttcttgaagtggtggcctaactacggctacactagaagaacagtatttggtatctgcgctctgctgaagccagttaccttcggaaaaagagttggtagctcttgatccggcaaacaaaccaccgctggtagcggtggtttttttgtttgcaagcagcagattacgcgcagaaaaaaaggatctcaagaagatcctttgatcttttctacggggtctgacgctcagtggaacgaaaactcacgttaagggattttggtcatgagattatcaaaaaggatcttcacctagatccttttaaattaaaaatgaagttttaaatcaatctaaagtatatatgagtaaacttggtctgacagttaccaatgcttaatcagtgaggcacctatctcagcgatctgtctatttcgttcatccatagttgcctgactccccgtcgtgtagataactacgatacgggagggcttaccatctggccccagtgctgcaatgataccgcgagacccacgctcaccggctccagatttatcagcaataaaccagccagccggaagggccgagcgcagaagtggtcctgcaactttatccgcctccatccagtctattaattgttgccgggaagctagagtaagtagttcgccagttaatagtttgcgcaacgttgttgccattgctacaggcatcgtggtgtcacgctcgtcgtttggtatggcttcattcagctccggttcccaacgatcaaggcgagttacatgatcccccatgttgtgcaaaaaagcggttagctccttcggtcctccgatcgttgtcagaagtaagttggccgcagtgttatcactcatggttatggcagcactgcataattctcttactgtcatgccatccgtaagatgcttttctgtgactggtgagtactcaaccaagtcattctgagaatagtgtatgcggcgaccgagttgctcttgcccggcgtcaatacgggataataccgcgccacatagcagaactttaaaagtgctcatcattggaaaacgttcttcggggcgaaaactctcaaggatcttaccgctgttgagatccagttcgatgtaacccactcgtgcacccaactgatcttcagcatcttttactttcaccagcgtttctgggtgagcaaaaacaggaaggcaaaatgccgcaaaaaagggaataagggcgacacggaaatgttgaatactcatactcttcctttttcaatattattgaagcatttatcagggttattgtctcatgagcggatacatatttgaatgtatttagaaaaataaacaaataggggttccgcgcacatttccccgaaaagtgccacctgacgtctaagaaaccattattatcatgacattaacctataaaaataggcgtatcacgaggccctttcgtctcgcgcgtttcggtgatgacggtgaaaacctctgacacatgcagctcccggagacggtcacagcttgtctgtaagcggatgccgggagcagacaagcccgtcagggcgcgtcagcgggtgttggcgggtgtcggggctggcttaactatgcggcatcagagcagattgtactgagagtgcaccatatgcggtgtgaaataccgcacagatgcgtaaggagaaaataccgcatcaggcgattccaacatccaataaatcatacaggcaaggcaaagaattagcaaaattaagcaataaagcctcagagcataaagctaaatcggttgtaccaaaaacattatgaccctgtaatacttttgcgggagaagcctttatttcaacgcaaggataaaaatttttagaaccctcatatattttaaatgcaatgcctgagtaatgtgtaggtaaagattcaaacgggtgagaaaggccggagacagtcaaatcaccatcaatatgatattcaaccgttctagctgataaattcatgccggagagggtagctatttttgagaggtctctacaaaggctatcaggtcattgcctgagagtctggagcaaacaagagaatcgatgaacggtaatcgtaaaactagcatgtcaatcatatgtaccccggttgataatcagaaaagccccaaaaacaggaagattgtataagcaaatatttaaattgtaagcgttaatattttgttaaaattcgcgttaaatttttgttaaatcagctcattttttaaccaataggccgaaatcggcaaaatcccttataaatcaaaagaatagaccgagatagggttgagtgttgttccagtttggaacaagagtccactattaaagaacgtggactccaacgtcaaagggcgaaaaaccgtctatcagggcgatggcccactacgtgaaccatcaccctaatcaagttttttggggtcgaggtgccgtaaagcactaaatcggaaccctaaagggagcccccgatttagagcttgacggggaaagccggcgaacgtggcgagaaaggaagggaagaaagcgaaaggagcgggcgctagggcgctggcaagtgtagcggtcacgctgcgcgtaaccaccacacccgccgcgcttaatgcgccgctacagggcgcgtactatggttgctttgacgagcacgtataacgtgctttcctcgttagaatcagagcgggagctaaacaggaggccgattaaagggattttagacaggaacggtacgccagaatcctgagaagtgtttttataatcagtgaggccaccgagtaaaagagtctgtccatcacgcaaattaaccgttgtcgcaatacttctttgattagtaataacatcacttgcctgagtagaagaactcaaactatcggccttgctggaatatccagaacaatattaccgccagccattgcaacggaatcgccattcgccattcaggctgcgcaactgttgggaagggcgatcggtgcgggcctcttcgctattacgctgtagttaatgattaacccgccatgctacttatctacgtagccatgctctagtcgaccaattctcatgtttgacagcttatcatcgcagatccgggcaacgttgttgccattgctgcaggcgcagaactggtaggtatggaagatctatacattgaatcaatattggcaattagccatattagtcattggttatatagcataaatcaatattggctattggccattgcatacgttgtatctatatcataatatgtacatttatattggctcatgtccaatatgaccgccatgttgacattgattattgactagttattaatagtaatcaattacggggtcattagttcatagcccatatatggagttccgcgttacataacttacggtaaatggcccgcctggctgaccgcccaacgacccccgcccattgacgtcaataatgacgtatgttcccatagtaacgccaatagggactttccattgacgtcaatgggtggagtatttacggtaaactgcccacttggcagtacatcaagtgtatcatatgccaagtccgccccctattgacgtcaatgacggtaaatggcccgcctggcattatgcccagtacatgaccttacgggactttcctacttggcagtacatctacgtattagtcatcgctattaccatggtgatgcggttttggcagtacaccaatgggcgtggatagcggtttgactcacggggatttccaagtctccaccccattgacgtcaatgggagtttgttttggcaccaaaatcaacgggactttccaaaatgtcgtaataaccccgccccgttgacgcaaatgggcggtaggcgtgtacggtgggaggtctatataagcagagctcgtttagtgaaccgtcagatctctagaagctgggtaccgcgggcccgggatccatcgccacc

SEQ ID NO: 340 - DNA, 8350 bp, synthetic construct
  source 1..8350: mol_type = other DNA; note = pBCB-23-0065 CDS Aflibercept 2
atgtacagaatgcagctgctgctgctgatcgccctgagcctggccctggtgaccaacagcagcgacaccggcagacccttcgtggagatgtacagcgagatccccgagatcatccacatgaccgaggcagagagctggtgatcccctgcagagtgaccagccccaacatcaccgtgaccctgaagaagttccccctggacaccctgatccccgacggcaagagaatcatctgggacagcagaaagggcttcatcatcagcaacgccacctacaaggagatcggcctgctgacctgcgaggccaccgtgaacggccacctgtacaagaccaactacctgacccacagacagaccaacaccatcatcgacgtggtgctgagccccagccacggcatcgagctgagcgtgggcgagaagctggtgctgaactgcaccgccagaaccgagctgaacgtgggcatcgacttcaactgggagtaccccagcagcaagcaccagcacaagaagctggtgaacagagacctgaagacccagagcggcagcgagatgaagaagttcctgagcaccctgaccatcgacggcgtgaccagaagcgaccagggcctgtacacctgcgccgccagcagcggcctgatgaccaagaagaacagcaccttcgtgagagtgcacgagaaggacaagacccacacctgccccccctgccccgcccccgagctgctgggcggccccagcgtgttcctgttcccccccaagcccaaggacaccctgatgatcagcagaacccccgaggtgacctgcgtggtggtggacgtgagccacgaggaccccgaggtgaagttcaactggtacgtggacggcgtggaggtgcacaacgccaagaccaagcccagagaggagcagtacaacagcacctacagagtggtgagcgtgctgaccgtgctgcaccaggactggctgaacggcaaggagtacaagtgcaaggtgagcaacaaggccctgcccgcccccatcgagaagaccatcagcaaggccaagggccagcccagagagccccaggtgtacaccctgccccccagcagagacgagctgaccaagaaccaggtgagcctgacctgcctggtgaagggcttctaccccagcgacatcgccgtggagtgggagagcaacggccagcccgagaacaactacaagaccaccccccccgtgctggacagcgacggcagcttcttcctgtacagcaagctgaccgtggacaagagcagatggcagcagggcaacgtgttcagctgcagcgtgatgcacgaggccctgcacaaccactacacccagaagagcctgagcctgagccccggctgaagcggccgctcgaggccggcaaggccggatccagacatgataagatacattgatgagtttggacaaaccacaactagaatgcagtgaaaaaaatgctttatttgtgaaatttgtgatgctattgctttatttgtaaccattataagctgcaataaacaagttaacaacaacaattgcattcattttatgtttcaggttcagggggaggtgtgggaggttttttaaagcaagtaaaacctctacaaatgtggtatggctgattatgatccggctgcctcgcgcgtttcggtgatgacggtgaaaacctctgacacatgcagctcccggagacggtcacagcttgtctgtaagcggatgccgggagcagacaagcccgtcagggcgcgtcagcgggtgttggcgggtgtcggggcgcagccatgaggtcgactagcttggcacgccagaaatccgcgcggtggtttttgggggtcgggggtgtttggcagccacagacgcccggtgttcgtgtcgcgccagtacatgcggtccatgcccaggccatccaaaaaccatgggtctgtctgctcagtccagtcgtggacctgaccccacgcaacgcccaaaataataacccccacgaaccataaaccattccccatgggggaccccgtccctaacccacggggccagtggctatggcagggcctgccgccccgacgttggctggagccctgggccttcacccgaacttggggggtggggtggggaaaaggaagaaacgcgggcgtattggccccaatggggtctcggtggggtatcgacagagtgccagccctgggaccgaaccccgcgtttatgaacaaacgacccaacacccgtgcgttttattctgtctttttattgccgtcatagcgcgggttccttccggtattgtctccttccgtgtttcagttagcctcccccatctcccgatccggacgagtgctggggcgtcggtttccactatcggcgagtacttctacacagccatcggtccagacggccgcgcttctgcgggcgatttgtgtacgcccgacagtcccggctccggatcggacgattgcgtcgcatcgaccctgcgcccaagctgcatcatcgaaattgccgtcaaccaagctctgatagagttggtcaagaccaatgcggagcatatacgcccggagccgcggcgatcctgcaagctccggatgcctccgctcgaagtagcgcgtctgctgctccatacaagccaaccacggcctccagaagaagatgttggcgacctcgtattgggaatccccgaacatcgcctcgctccagtcaatgaccgctgttatgcggccattgtccgtcaggacattgttggagccgaaatccgcgtgcacgaggtgccggacttcggggcagtcctcggcccaaagcatcagctcatcgagagcctgcgcgacggacgcactgacggtgtcgtccatcacagtttgccagtgatacacatggggatcagcaatcgcgcatatgaaatcacgccatgtagtgtattgaccgattccttgcggtccgaatgggccgaacccgctcgtctggctaagatcggccgcagcgatcgcatccatggcctccgcgaccggctgcagaacagcgggcagttcggtttcaggcaggtcttgcaacgtgacaccctgtgcacggcgggagatgcaataggtcaggctctcgctgaattccccaagtcaagcacttccggaatcgggagcgcggccgatgcaaagtgccgataaacataacgatctttgtagaaaccatcggcgcagctatttacccgcaggacatatccacgccctcctacatcgaagctgaaagcacgagattcttcgccctccgagagctgcatcaggtcggagacgctgtcgaacttttcgatcagaaacttctcgacagacgtcgcggtgagttcaggctttttcatatctcattgccccccgggatctgcggcacgctgttgacgctgttaagcgggtcgctgcagggtcgctcggtgttcgaggccacacgcgtcaccttaatatgcgaagtggacctcggaccgcgccgccccgactgcatctgcgtgttcgattcgccaatgacaagacgctgggcggggtttgtgtcatcatagaactaaagacatgcaaatatatttcttccggggacaccgccagcaaacgcgagcaacgggccacggggatgaagcagggcggcacctcgctaacggattcaccactccaagaattggagccaatcaattcttgcggagaactgtgaatgcgcaaaccaacccttggcagaacatatccatcgcgtccgccatctccagcagccgcacgcggcgcatctcggggccgacgcgctgggctacgtcttgctggcgttcgtagagcatggctacgtagataagtagcatggcgggttaatcattaactacacagctgcattaatgaatcggccaacgcgcggggagaggcggtttgcgtattgggcgctcttccgcttcctcgctcactgactcgctgcgctcggtcgttcggctgcggcgagcggtatcagctcactcaaaggcggtaatacggttatccacagaatcaggggataacgcaggaaagaacatgtgagcaaaaggccagcaaaaggccaggaaccgtaaaaaggccgcgttgctggcgtttttccataggctccgcccccctgacgagcatcacaaaaatcgacgctcaagtcagaggtggcgaaacccgacaggactataaagataccaggcgtttccccctggaagctccctcgtgcgctctcctgttccgaccctgccgcttaccggatacctgtccgcctttctcccttcgggaagcgtggcgctttctcatagctcacgctgtaggtatctcagttcggtgtaggtcgttcgctccaagctgggctgtgtgcacgaaccccccgttcagcccgaccgctgcgccttatccggtaactatcgtcttgagtccaacccggtaagacacgacttatcgccactggcagcagccactggtaacaggattagcagagcgaggtatgtaggcggtgctacagagttcttgaagtggtggcctaactacggctacactagaagaacagtatttggtatctgcgctctgctgaagccagttaccttcggaaaaagagttggtagctcttgatccggcaaacaaaccaccgctggtagcggtggtttttttgtttgcaagcagcagattacgcgcagaaaaaaaggatctcaagaagatcctttgatcttttctacggggtctgacgctcagtggaacgaaaactcacgttaagggattttggtcatgagattatcaaaaaggatcttcacctagatccttttaaattaaaaatgaagttttaaatcaatctaaagtatatatgagtaaacttggtctgacagttaccaatgcttaatcagtgaggcacctatctcagcgatctgtctatttcgttcatccatagttgcctgactccccgtcgtgtagataactacgatacgggagggcttaccatctggccccagtgctgcaatgataccgcgagacccacgctcaccggctccagatttatcagcaataaaccagccagccggaagggccgagcgcagaagtggtcctgcaactttatccgcctccatccagtctattaattgttgccgggaagctagagtaagtagttcgccagttaatagtttgcgcaacgttgttgccattgctacaggcatcgtggtgtcacgctcgtcgtttggtatggcttcattcagctccggttcccaacgatcaaggcgagttacatgatcccccatgttgtgcaaaaaagcggttagctccttcggtcctccgatcgttgtcagaagtaagttggccgcagtgttatcactcatggttatggcagcactgcataattctcttactgtcatgccatccgtaagatgcttttctgtgactggtgagtactcaaccaagtcattctgagaatagtgtatgcggcgaccgagttgctcttgcccggcgtcaatacgggataataccgcgccacatagcagaactttaaaagtgctcatcattggaaaacgttcttcggggcgaaaactctcaaggatcttaccgctgttgagatccagttcgatgtaacccactcgtgcacccaactgatcttcagcatcttttactttcaccagcgtttctgggtgagcaaaaacaggaaggcaaaatgccgcaaaaaagggaataagggcgacacggaaatgttgaatactcatactcttcctttttcaatattattgaagcatttatcagggttattgtctcatgagcggatacatatttgaatgtatttagaaaaataaacaaataggggttccgcgcacatttccccgaaaagtgccacctgacgtctaagaaaccattattatcatgacattaacctataaaaataggcgtatcacgaggccctttcgtctcgcgcgtttcggtgatgacggtgaaaacctctgacacatgcagctcccggagacggtcacagcttgtctgtaagcggatgccgggagcagacaagcccgtcagggcgcgtcagcgggtgttggcgggtgtcggggctggcttaactatgcggcatcagagcagattgtactgagagtgcaccatatgcggtgtgaaataccgcacagatgcgtaaggagaaaataccgcatcaggcgattccaacatccaataaatcatacaggcaaggcaaagaattagcaaaattaagcaataaagcctcagagcataaagctaaatcggttgtaccaaaaacattatgaccctgtaatacttttgcgggagaagcctttatttcaacgcaaggataaaaatttttagaaccctcatatattttaaatgcaatgcctgagtaatgtgtaggtaaagattcaaacgggtgagaaaggccggagacagtcaaatcaccatcaatatgatattcaaccgttctagctgataaattcatgccggagagggtagctatttttgagaggtctctacaaaggctatcaggtcattgcctgagagtctggagcaaacaagagaatcgatgaacggtaatcgtaaaactagcatgtcaatcatatgtaccccggttgataatcagaaaagccccaaaaacaggaagattgtataagcaaatatttaaattgtaagcgttaatattttgttaaaattcgcgttaaatttttgttaaatcagctcattttttaaccaataggccgaaatcggcaaaatcccttataaatcaaaagaatagaccgagatagggttgagtgttgttccagtttggaacaagagtccactattaaagaacgtggactccaacgtcaaagggcgaaaaaccgtctatcagggcgatggcccactacgtgaaccatcaccctaatcaagttttttggggtcgaggtgccgtaaagcactaaatcggaaccctaaagggagcccccgatttagagcttgacggggaaagccggcgaacgtggcgagaaaggaagggaagaaagcgaaaggagcgggcgctagggcgctggcaagtgtagcggtcacgctgcgcgtaaccaccacacccgccgcgcttaatgcgccgctacagggcgcgtactatggttgctttgacgagcacgtataacgtgctttcctcgttagaatcagagcgggagctaaacaggaggccgattaaagggattttagacaggaacggtacgccagaatcctgagaagtgtttttataatcagtgaggccaccgagtaaaagagtctgtccatcacgcaaattaaccgttgtcgcaatacttctttgattagtaataacatcacttgcctgagtagaagaactcaaactatcggccttgctggaatatccagaacaatattaccgccagccattgcaacggaatcgccattcgccattcaggctgcgcaactgttgggaagggcgatcggtgcgggcctcttcgctattacgctgtagttaatgattaacccgccatgctacttatctacgtagccatgctctagtcgaccaattctcatgtttgacagcttatcatcgcagatccgggcaacgttgttgccattgctgcaggcgcagaactggtaggtatggaagatctatacattgaatcaatattggcaattagccatattagtcattggttatatagcataaatcaatattggctattggccattgcatacgttgtatctatatcataatatgtacatttatattggctcatgtccaatatgaccgccatgttgacattgattattgactagttattaatagtaatcaattacggggtcattagttcatagcccatatatggagttccgcgttacataacttacggtaaatggcccgcctggctgaccgcccaacgacccccgcccattgacgtcaataatgacgtatgttcccatagtaacgccaatagggactttccattgacgtcaatgggtggagtatttacggtaaactgcccacttggcagtacatcaagtgtatcatatgccaagtccgccccctattgacgtcaatgacggtaaatggcccgcctggcattatgcccagtacatgaccttacgggactttcctacttggcagtacatctacgtattagtcatcgctattaccatggtgatgcggttttggcagtacaccaatgggcgtggatagcggtttgactcacggggatttccaagtctccaccccattgacgtcaatgggagtttgttttggcaccaaaatcaacgggactttccaaaatgtcgtaataaccccgccccgttgacgcaaatgggcggtaggcgtgtacggtgggaggtctatataagcagagctcgtttagtgaaccgtcagatctctagaagctgggtaccgcgggcccgggatccatcgccacc

SEQ ID NO: 341 - DNA, 21133 bp, Homo sapiens
  source 1..21133: mol_type = genomic DNA; note = RPE65 gene
cttcattctgcagttggtgccagaactctggatcctgaactggaagaaaatgtctatccagtaagtatctctgggagacttttttaaaacaccttcatggattcatgataaatgtgctatttcaagggctcctgaagagaaggcattgattaatgacctgtttaggaaagacccttgaattttggtggggaaattttttcctgcttatgtattaaagcaactagctagaattcaggtccaaattatggggggtttgtgtgacttagcccggggtttggaagcagtcttgagtatggggatttcagacagacttgggctccactccttgcccagtcatttcctagtgtgtgactttggacaaattacctaactttttaagtctagcttttcctgtatatagaaagatgtcacaatagcttttactccattatgttactgtgagatttaaaagagataataccatgcaaagttctttttatggtatgtaggacatagtaattgtttagtaaaaggtaattattataattgagtctggtcagagattccactctttgaagttacaacatgaaactgaacagaggatgtagaaagtaaacaaaaatatagaacctgaatctcctggtctgactatgatgaaaaagtactgtaggtcttggggattggtagagaaatgagatgatggggaaaaaattatggtataatatgagtgaataatgaaagatgaggtacctgacccaaaaagctgtcatctctcaacccctaggaaggagataaatgggtctctccttgaggcaagaaaatcaatgatgctgtgagctgagcatgttgatagggtgggagaatactgtgggaaggaccctgtttaggaacaaatttcaggaagtgaactgatggcagtaggattgattgatttgtcttccgaagtaaggaaaaactgcagaggacaggattaagttcactgtaaccattgacattaaaagagaggtcatgtctcttgacatcagagcagtgatctgggacccccttccatacctgagtagtcttccccacccccagcctcacgtgctcctcccgccctcaccttcgcttctccccccacccccacccccacccagctgagactagaccggcaggagtgaacaggctttgagccagccctagagtgccttctctcctgcagctctgcctctatctctgcggactttgagcatcaacatgggcttcttccttattcttccaccatttcagggttgagcatcctgctggtggttacaagaaactgtttgaaactgtggaggaactgtcctcgccgctcacagctcatgtaacaggttggtctcgcccatcttgaagccatcctcttttatgtcagtctctcttctctggcttcctattccttggcgtctctcagtgcagactccccctgtgggtcacagggagagggatcaggtggtttgggctttttatagcaagaacccattttctttcattcgcctttactttatttctctaatgcagaaaaacgctacctaattggaattccctaaggatcaggattacacctttgtcatcttcaaactgtcagtgcctagctcagtgcctggcacatagtaaatgtcctataaatgtctgttccattggtgtctgaataaatgaaggcccagtgacaagcacctgggagtattaaagggtggtgggtttcatgcccattttattagaggaatgttggttctgctgggaggcagatgtagatgctaacctagctctatcatttcactgtctgtgaatcctctaagttacttaaacgttctgagcctcaattcccttacctacaaaaacccaaaatttacgtcatgaggatgttgtgaaaattaagtggagtaatgtaaatagaatgattcacccactatccaacacaaagtgatcaatagacagtaattattactatcagtatcattattagttataggaaataatccatttgcttgaaaaacttcactggtaggaatcaaggaagcactgtcaatcactgcccttctcaaaggataaacctacctggggttttttttgtttgtttttttgtttgtttgtttgttttgttttttgagacagagtctcgctcagtcgcccaggctggagtgcagtgggatgatctcagctcactgcaagctccgcctcatgggtttatgccattctcctgcctcagcctttccaagtagctgggactacaggcgcccgccatcacgcccggctaatttttcgtatttttagtagagacggggtttcgccgtggtctcgatctcctgacctcgtgatccgcccgcctaggcctcccaaagtgctgggattacaagcgcgagccaccgcgcccggccctacctgggtttttagggacaaacctaactgtgaaagctgagaggccttaaggactatcttgggtaccccacattttgcagatgagaacactgaggtccagagatgacatgtgagctgatcctaaaccagaagtcatgtccctgacatccaaccctgtggactttctgctacagcagattgactttcatccaagcagtagctcacactcacagagggatatagctctagattttaaagagccaggattcctgttttttcatttaaatagtcttttttctatagacacatctttttaaaatacatttattctcactcttaatccatacttctactcctcactccactaaaatatatcaagaaatttgaaaatcttcttaaaaatgagatggcaaaaggcaaatggattggtgtttggggaaatctattaggtggagagtcccaatcctctcaagatgcttctccctcactccttccaaccctttatccacactctggggcatctccacatttcccaaggtgtgatctcctagtgaaggtgagtcaagtcagcagacattttctaagtgctgtccagcgcgagggctggaaatgaaaatcactgccagctctatgaggaagaagctgcccaatcaggctgctgatatactctgccttaccaaggacaagcctagcccaaggcagggataagaagcaatgttctgtctccccttcatcacaggcaggatccccctctggctcaccggcagtctccttcgatgtgggccaggactctttgaagttggatctgagccattttaccacctgtttgatgggcaagccctcctgcacaagtttgactttaaagaaggacatgtcacataccacagaaggtaaagcagcactccatgccactcctcctcctcaaagtagggcctagcttggctcctcctcccatgtgagttttcacctctgaactcaggaggcaacctatatacccactttcttctcacaatgtacctgggccagtgtgtctgcatggatacgagggaacattatcatggaataaaggagaagctaaagcctagggctttggggtccaacatgagtggctttaaaccctgtattcaacagacatgacttgcctaggagggtaaccttggcaagatgttgacctccaattcttggttttataattagtaaaatgggagaaataatagaatctaccttatatattcattacaagcattaaatgagagcgcagtgtctagcacacacaaagcacttcataataatagctattgtgatgcttgttattattattaaaccattggccatcttgattcctttttctttttataaaattggaaaggccactgggaaaggggtcgggggctgccacaaagtagtgaaggatgaaacatgtcatagtgctaccagaaagagaagttttctgaaaacaagagattattgctaaaaagccttgaagccctaaatcatcattccaggaaacccccattaatgaagtattaacaaatactttgtcttctgctttcgtgttcaagcctattagtggctttgttgatcaccacagatttcaggcattttgaaaagacctgtaaagaaaaagtgaaaggggacttgaagcaggacaacttgcatgataatagaagagaaacggatgatgtcaagcagaaatgtagccataagagcttactgtggagttcagataaagcttcctataccttcgacagagcagggtactctttcttcttcataaaagtgcgaccgggtgtgggtggctcacatctgtaatcccagcactttgggaggccaaggcggccagatcacttgaggtcaggagtttgagaccagcctggctagcatggtgaaaccccgtctctactaaaaatacagaaaaattagccgggcgtggtggtacacgcctgtagtcccagctacctgggaggctgaggcaagagtatagcttgaacccaggaggcggaggttgcagtgagccaagattgcgccactgcactccagcctgggcaacagagcaagactccatctcaaattaattaattaattaattaattaaaagtacaaaatcagattttaactggctctccatatcagaaatcctgggcaaagtatgctgtctactctaagatatggtttagcagacctgtctaggcaagagatggaattcaagaatacttaatttttaaaacaaaataaatgttaaaattgaagaaaaacataaaagtaacagagggagattgagaagaatataattcagcacaccatgtccggaattttcccagtaagtttaggttgataggttataggtgatgggggtgggggtcctatgtgaacttcccccagggctgcatggtgtgatatagaaagttcatgttgtcctgctctggccaactaggattctaacccagcttggccacatatgccaatcacttaactcctctgaacctcaatttcctcatctgtgaggtttaaaagataaaaacgtaaactcaagggacattgtgtctgccctgcttggtcaccccaagaaagtgagctaataaaaccctttattcttcatgttgtgcatttatgattgtgacttgatgaggacacatagaatggccattctaagctccacatgggctgtacggattgctcctgtctatactcttccctatgtttcaatgtccttcaggttcatccgcactgatgcttacgtacgggcaatgactgagaaaaggatcgtcataacagaatttggcacctgtgctttcccagatccctgcaagaatatattttccaggttactgaacccaaactgaatgttactcaagacattttatattagccctttttctctcatggcttgaaaattactggactgaaaaattcatttgtttctacaggtttttttcttactttcgaggagtagaggttactgacaatgcccttgttaatgtctacccagtgggggaagattactacgcttgcacagagaccaactttattacaaagattaatccagagaccttggagacaattaagcaggtgggacacagtgctaggtgatgttcaggaatttagaatttggaacttaaaattaattcaacataaattattcatgctgcgaatgtatgattctaacttgatgaggacacacagaatgaccattccaagctccaaatggactgcactgattgcctctgtctatgatgctttcctgcaattggtgtaatttggtgaaaagaacatgagagccacattaagtttcaaatcctagcattgtcaacaatgactagctatttgacataggacaaacattgtttcttcatctctaaaattttaaacacttacatggattggagagaacccatataaaatgcctaacatattcattcattcattcatgacacaaatacttatcaagtgctttccatattcagaatttatgctagatgcaagggatagatcaatgagtagggtaacatggtccctgcctttcatagcttttataagctagcatgaacctggtaaatactgggtgctcaaaaaattatagctactgatactgaaaatcatgctatttatggttctaggcaagtatgttgcactaatttgccccttcttatagatacttcttattagaaataaagctatatcttgaatgaaatagcatagaacaaaatttcagcaatatttggaagtgacaaattttatggagaacttagggaatctcaatgcagcagtccttagatacacattttgaaccaatatttactaagatacacctatttacaaggcattgttcttgtcttcaggtgacttaatgtctaggtggagaaatcaaatatgtaactgtaataggacaaagaatatgacgagtcttttaagaaggaaaatcttttaagaaagcataaatacgaaaggaattacttctggaagtagttggcaatgcaaggtgggacaggtgaaagaaggcttaaagggaaaggctttgggctggaagttaaaagagagggatgatttcagtgaatttagagaaaggatatgctagatggagggggtaaagcgatcaaaagcatggaggtagaaggtgttcatgaaaactggagaataatctccttggactagacttgcagcatttctcagtggaggtattagtatgacattaggcagggggtgactcatcatcatggagacgtcccacacatgggagaggtttggcatccctggcctcatccactaaacaccagtcatgttttcaatcattatacaaacccaaaacgctcctgacatttccgtatcttcccctagggggcaataacactcccagttgagaactagttgcctagagtagttaatgtcaaggggaatattgagacacagggtaggatgaaattaaaagcttgaataattggctatacatttggaatatgttgtttagctaatgggaagctactgaaagtttttgctcaaagaagtagtatgagtagggctatattttcagatgtttatttggggagccatgtgtgggctgtacgggaaggcaaaagagatacagtatagctgggagaccaagaggtgaaactaaaagccagaaccacaaatgcagtactggtaaaaataagaagaaaaaaaatagtctcaacattgagtctcaatagcacaagctgatctataattctcaacagactatttactatgtcttaacatacactccccatagctctttcttgtttatgttgtgtgtgtgtaaccatatacaagtgtgtgtgtagctcctttagagaagaacaaaagctgagtttctaaatcattcatttgactttgatagggaatctgtattacaattacatgatattttaattagaaatatagaagctatggtatggctgcagaatagactttattaggagtcaggttccactgttactagcactgtaaaatgtaattttaaaaatgtgaaatttttgattgtttactgttattaaccagtgcctttgcctccagcctgattcccttaaatacaatttatttaaggcagcagtagcaattttttaaaatataaatatgaaagtattactccacctagggaatccataacttcccaaataaagtccaagcgaaggtctttgtggctggcccactcttatttcgcctcctctacgcatgcccttcatggcagccaggttaaatgactagtaatggccaaacagcacacattatttcacaagtctatgcatttacattaggattcccactccctggaatacactgtcatcctgctccacttggctaactccacgcacctttcaaacattagttggagtcatgtttctcaggaaaactgcctcatccctcagtctgggctagatggcgcttctctacgatgccattgcacactcacagtgctttacaccggcttattggtctaatgcagggctgtccaatagaactttctgcaataatggaaatgctctataactgtgctatcctggtgttattaagcacttgaaatgtggctaatgtgactgaggagctgaatttgaagttctatctaaaaattagtggtcctgtattaatagaacagcacgggtctagaatgaagttcttgaaagcaaagatcttctctctcctgagccctgatacagtgcctggcacatagtgaaagctcagagtatttgataaatgattgactgaataaatgaatatcttgcctattatttaaataaggttgctaaaatgtcctatgctttaaaaaaatctccctaattaattggaaataattttggttagataaatatatattccagtaattattcattcaataactctttaccaagtaggtcccaggtggaaatctagtgctgatttatctagctctttatccttaaacaagacacttgatctctctggaaccccaatttatccttctgcaaacagagatttgtgttacatttgtagttctaaacttcttatgagacataaaattgaattaaatgctgtatgcttttgccagaaatgtttatatttaattaaaagagatccatggttctcctaaagtctatttaaattaagactttctatactagatgaagcttgaagtccctttcagttccaaactcatacagtaccatgtgcaagacatatagttggtatttacatagtaccatacgaaattgacatttttggaaatcagcaattattaaatgttagcaatcttatacaattaaatctaatacaataataagagtataaagaagtctgaggactcaaacttatggtttcaggtcaatctgcatatgctaaaagaaaagtaactaaccagagcactgtatggtatacatcaaataaagagatgtcacaggtaactccagattcagacacatgagggggcattatgttctgcatgaaggtgggaactcaaggtgaaagagggtagaatccagagagatgggaagaaagagaagtgcacttaggatgagagttcaaggggtagtgatgacctcagacctagggacaaaggtataatgtatcttccttctctcaactggaggacattcactttacttccgtaggttgatctttgcaactatgtctctgtcaatggggccactgctcacccccacattgaaaatgatggaaccgtttacaatattggtaattgctttggaaaaaatttttcaattgcctacaacattgtaaagatcccaccactgcaagcaggtgagtttaccaatctgtcctcttctgaaaataagtgtctatattgtgagaaagttactgtattgtgagaaagataagaatgtcagaatagcattttgtgcatagttaaattactctcagacttcagaagtactgccctcatccctaccctataaggggcctaatgcccaagggcatcatatcaaaggatgacgacttgaaaatatagaaagcaagtgtccaagttctcttctagaatattaaaaatgtagtacatatatatatatggatttgatcatatacaattaggattcaaacttagcaaacatttattgagcacttattcatgtgctaggcaaaattaaattaaataagcatgtatgtgtgcataatagcatacatacatatatgagagtgtactaaatatgttgcgcttaattcccaaaactacaaacaaatctgttatctcatagaagtactatagaaaaagaactacagcaaaaagagtgtaccctagaattctccattcattcttcatttattgccaggttcattgttcaccaccttgatgatggaattatttgaatgtatacagatttttgtttagtattatttagtacagttctcaaagtgtagtccttggaccaagaccatcacctaggaaactgttagaaatacaaatcttgagccttgtcctgggcagactgaatgagaaattttgggagtggagcctgcaatcagtattttaagaaactctttatgtgattctgatgcacactaaagtttgaggaccattcacttactagtgagtaaattttaatgtgcataagaattactgtacagggctattgacacaaacccatctaaactatatcctttgggcatcttaagatgttgcaaaaggcattttgaccattctgaggtttcttccctactcccctgacttaaaacccacctccagctattgcaagatgtgactccactacactccacttgccacaaccctatttgagtgcacgtttccaaatctgctgctatttggattttcctgggtgattttgcagcttcacatgaaatttcactaagaagtgcaaatgatggagaaaatgaaaataacccctctaaaacaatcaaaatgtgtttctttgcctgtataagctgttctaaatgctttgtattaaaaaaaaaataagaggctcttccaaagccttttaaaaccactttatttcagacaaggaagatccaataagcaagtcagagatcgttgtacaattcccctgcagtgaccgattcaagccatcttacgttcataggtaacttgaaggcctgctatgaatcttcaggaaaactcaagtttaaagatttgctttgcctacctttgataccaatcctgatcacaatatttttttgcagaaaactaaatttaaacataattaatttcatgtaggcactgttgattcttgtaactgagcataccacatatatacaaatttgtctgtggcttgagaatcagccctttcattcacaagcccatttgtgtttctgaacagttttggtctgactcccaactatatcgtttttgtggagacaccagtcaaaattaacctgttcaagttcctttcttcatggagtctttggggagccaactacatggattgttttgagtccaatgaaaccatgggggtaagtcttagatatatttgtcaagtttgtgattctgaagaagatgtgtttaataatgtacacttttttcctttttaaatgcatcaaaatattttcctcatttttcaaggtttggcttcatattgctgacaaaaaaaggaaaaagtacctcaataataaatacagaacttctcctttcaacctcttccatcacatcaacacctatgaagacaatgggtttctgattgtggatctctgctgctggaaagggtaagaaaggacactggacaaatgggacacctcccattgttcctggaaattacggggtttttacagagctgctgcactcaatctgaatcacatctaaaacagcaagagttatgtgagagtcaaaaatgtaattggaaaagcagtaggaagtttaggtaatctgaacatcaaaactatgattaatgattgaaaactaatcgggtccatgaaccccacctgaaaacaaaagattctgtgacctgagaggtgaacttaaagttgacaaaatccctggggaaacttgagccccatcttctctgcgaagggagaaaaagacatgcgtttttcagactagccaaatcactaagaagacaacagcacctaaggacacaaacagaatggtgacaggaagacagaacagaaagtatctcaaggctgctgttacttaaacaaatccattaagcaggttgctttattttcatcctgtgtgggcgggaggaaatggctctgatacacctggctcaatagcagtttctgggttgtggaataaagaacaggcaggcacttgtgcttaaaaaggcaagaatcatctctctaaaattatttgtcattgcctgtgctcatgtttgactttttatttttgcagatttgagtttgtttataattacttatatttagccaatttacgtgagaactgggaagaggtgaaaaaaaatgccagaaaggctccccaacctgaagttaggagatatgtacttcctttgaatattgacaaggtaacctgcttctctgtagatttcagatttaaccagaatgtttcatctctctcaggaattgtcctcctgcctcatgtttatacataaagtcttgaaatttgagagctagaaggagctttaaaaataggctaattaaacttccttcattttacaaatgaaactaaagctcagaagagtactgtgacttagcaaaagcaactgcagcagagccaggataagaaccaggtttttaaattctaaatctgccgttcttgtatttacaaaattgtctttaaaatatacttcctcggtgaatagtgcagatccactgattcctatgatactttatcaataatataaatagtttaaataatttgaagttctggagagatgaagcatcaaaaagtactcttgtagggaaaccagttcattattttggttttctataaatcttctgaaaaatatcactagaggttaaaaatcattactaacaatagacagtcatctctttatttctactttttcttccctgtatttagagactgtctttttagaataaccagagtaacatctagaatttgtagtgtgatggaaataccagtcaaaatcaataaaatataattctcacatataggtatgtgaatatatgctttcttttatatctatttgctccctggttgcacaaaaggggttattaaaacagctacatggaatgtaaaactttgtaccaaaggcttagatatggtgtagtagaaaataaactcaatttagaaccaaacaccactgctcttaagcaagtttgtaagctctatgaagaatgagaaagagggagaaggttgaggttgagtgttacagacaggcaaaggggcgtctataaaggcaaggaggagttaaaaatgcaagatttcatctataaatatgaagtagttgctgagtttggtttatttaggggtgtaggggagatgggttttgggcagagagactggaaagataggttggagcaatattgtaatgggctatataagcctttgagtgttatataaatatagggagccatttaagtattttaaatgtgtattttaagtgtattttaggacatgattagatctgtgattcagaaagttactctggcagcatcatggaagacagactggaaagtggagagtctagagcagaggctagaagccctattacaggattaatgcaatgaggcaaataaaagggaataagtagttgagttaagaaaatggtgactgagagatgaagatgcaaagctgagaaatatttaggcagcaaaatcaacagcagttggtatctaattacatgtgaggggtaagggagaggaaggagttcaggatgacttcaagatttccatcctgagcagttgagtgaatgatggtataattcactgaactgaaaacatagaagtaagaggagctgggccaggcgcagtggctcacacctgtaatcccagcagtttgggaggccgaggcgggtgcatcacccgaggttgggagttcaagaccagccttaccaacatggagaaacctcatctttactaaaaacacaaaattagctgggcatggtggtgcatgcctgtaatcccagctactcaggaggctgaagcaagagaatcgcttgaacccaggaggcagaggttgcagtgagccgagatcatgccattgcactccagcctgggcaacaagagtgaaattccatcataaataaataaataaataaataaataaataaataaataaatagaagtaacaggagctagcttgtagaaaaaagaataaattttactttatagatgtaatttgaaagtacccactagcaatcttagcaaagcattccataggcagctgctgtacatggatctggagctccaaagaaagatcatggagagagatcaatctgggtaccttaaggatttttgctttccccttaagaagcatatcactgacatgtagttgagcattcccaaaatactcaccaaatggatgagtcagttaatttcagtaaactcttacttcgctaataatggtaaaaatcacaatcatctttaaggaaataaaagaggatcacttaacttaaatattcacattgcaaaataaagaaaaaagaaggatttttctaactgtatggttatcacggcctgaagaaatattacccaattatagaatagggaactgtaataatcataaaaaatgtctaacatcatcaaatccgtctcctctttcttctaatagttattgagtagccactaaaacaggcatcatactatttgttgcagtgggtacataaaatacacttctagttctcatggagcccgttacctagtgtatcagagagaaagaagccgaatcaggaatagccatgcatgtcagcacaggagtagtactctcaggagggataaattgatttgttaatagctagtcagatgataatgtaggggagattaatggaacatagttatttgcaatgggcagtaatatggcaggtggagatgggattgaggcagaacaactgaagacagaaagaacagtttgaggaaagacagataggtggagagggagatacgcagagagaattggctattataattggttgaaacataggcaaaagtagtaaagtaaatgggataaaaagttataaaagtacgttgtactcttagaaggctttaaggccaggctaagaaatttgcactttattgaactggtaatggaaagacagtgaaggtttttacacaaaagaaaagcccataattaatggtattgaaatgataatgaaatatgtaagaatagagagataagactgcaggcagggggggaaatcatattttagattaggttttccaaaagaaacatttaaaatttgcttatttaaaaaataaagaatttgagagccagagaatacagagagagaagacagccaagcacagtagctccagaaaataaacatgtgtagaaaatggtagaaacaagagaagccagaaaaagaaacaagagaagccagaaaaagaaacaagagccaccagaaagccctagttcctactaagagagagtaacgtcacaaagatgagtgcaggtgagggttatacggtgcccattgccatagacaagttgaaaagggtgaagactaagaataaagcactaggtttggtgatctctaagggaatagagtgagagagacagaagtcaggcttcagggctcttaaggtaagcagttgagtatctggaaagcagttactgcgtgcacactcttaaaagtttggcaatgaagagaaaaatagaaagggcttaggtcccagttacttggaagactgaggcaggaggattgcttgagtccaggagttcaaagttacagtgagctacatgccattgcagtccagcctgaggaaaagaacaagaccccatctcaacaaacaaacaaacaaaacagaacaagactccatctcaagaaacaaacaaacaaacaaacaaacaggaaatctaatttaacaatgaaaataagcaaaatagaacaaagtaaaaaattcaacttgaaaccacataaataatatattaaacatagacatagacatttgtacttattgtatgcatgtacataaatatgcatacatgtgcacacccctcgcttcttcccagcatcaccactaagtacctcgagtcccttatttcacaaaatcttgcagaatcttctcctctattggctcccacctcccatcctttccctattctgaaaatcttccactatttacttttaattcttagtccaccaccagaaaaaatctcctgtcttctcttcttagaatgttgccttcaacctccttttttaaccaaaatctggctctctcccctaaggacactggtctccccaacagtaatttccaggggaatcagtttctcctctgtacagggtacagcccttttaccacttggcctggagttggggtagaggtccttcttctttgctgctttcagatcattgttccctctattcacccttaaaattccctaagttttcatctcattttatctaatcatatagccaagtgatgtatatgtgtgtgtgtgtgtgtgtgtgtgtatatatatatatatatatatatatccctcatgccctcgactttgccactacttaagactatactccttccataatctgtttcatgcatgacccactctgaccttttatctttcaacatcacttgccctactgcaatttccaccaggaacttccaatccattgaacacagtactttctcactctctctcactacgttgaggatttaccttctctcctcactcaatttaagctttacagtcaataattacaaacactttctcatgtagaccttcctttcccttgcctctttcttaccttatcaaagtcatttgtcaaaatcacaaccctagttaaattcagctctccaccccctccatgcttatacctctgaggctgaactaagtgcagacaacacacaatcatgttaattggttccattttagatgcatgaccacaaatctttctgctacatttcccggcttcacttactctctcactttgctagttaaatattccacaccctcctctctttaaacttttaccacctcccacttcccgcctccacactcagatgcagctgatggctatgttttctttttctctgaaacaaatgaaagaaatcagaaaggaaccatagacttgccagcacatctacccacccaccagcatctgtactcatatactgaattatccatcttcctatccagagctgatctctttcatcctccttcacattctcagggaaatcactctcccaattctccccatctttcctagatcaccactctcctacccttttcgatggatcatttttgtcaggctcttacaaaatccttctcttgacatttttgccccaaccagctaccttctcattcctcgtcttgttggagggccttggttcccctatcttccatttatacactcactcgttgttaaatattcatgccttattcatttacatttttagctttctcttaaactcaaggttcttacctgctagcgccagctccacatctgcatttggatgcccaatagacatctcaagtctaataagacaagacttgaacttctcatcttcccccaccaaaaatttactccacctgtagttcctatctttgttgtgacatcaacattgtacaggtcaaacaccttggtgttatgcttgatgcctctcttactttcatgcctcttcctcgtcccatatcctatttaacaggaaatcttcttgactctgtcctccacttcttccacttctcactgactgcaatgctactggcctagtgtgaaccattgttttctttcaactagactactacaagacaaactggtttccctgattccactcttggatcctccctactaacaaggctaccctaaaaataaatcatagcatctcactcctgtgctgaaaaccctccaatggcttcccatcactcactcacagagaaagatcaagtcctcataatgacctacgaggctttgtacagcctggctcgtgacctccccaccttcctttcttattctctcccctagctcagttgatagaatccacactggactctttgatgctcctcaaacacactcagcatcctcctccctcaggcctttgcacaatttgttctcttagcgtgaacactcttccccagatatctgcattgctaattctctcatcttctaagagttttgtctcctctgccacctgttcaaagagacctacccgaaccatctattcaaattttaaccgcttacccttcacgtttctgatcttttttcctctattctatttttcccccacatttgtggtatattataaaatttattaattatatttattgtatatctccttgaactagaatgtaggcttcatgaggacagggacttcactctccaaaacatcctgaatgccaagaatagagtctagaataaaatatgtaatcaagtatttgatgaaattattaataagtagatatgttagaaaaatctcatggtatttcataaaataatcagaaaaatcatgtgtgtgtgacaagagatcttaggaaacatatggtccagcgttttttttttttctttttgtcaacataactgtaaggattttttttttcaagcaaaatcaaaacatattctacgtgtgaacgaaatatacattctttcatccctcaggcagtcgaagtctttgttgttctgcagaaaaacattaattattattattattggttttgagatttttgtttggtttttgtttttttgtttttcagaggcctttctttggagccctaaattttcttcaaggatggtctcattttactgaagagaaaattgatggcctaagaggttatgtgactttcccagtgatacatagccagtgactgacacaggcacagatagcttgcccagtcgcgtcccagggtccctcatctatagcttcctgcagttcctccctgcatgttgacctaaaaaagaacttaggagccaagacttaagaactctgcatttctggctgtttgaattctttcctgctcactgaggtttctgttatcttctctcctaggctgacacaggcaagaatttagtcacgctccccaatacaactgccactgcaattctgtgcagtgacgagactatctggctggagcctgaagttctcttttcagggcctcgtcaaggtgagatgatctagagaaaacttcacacgggagtgaacaaatgtttctttcaaagagattaagagttttcctaagcatgtgctctatttcgtagcatttgagtttcctcaaatcaattaccagaagtattgtgggaaaccttacacatatgcgtatggacttggcttgaatcactttgttccagatagggtaattaatccttcttactaatatttgaacagtgctttgagtatatgctagtcaagtaaagcatattgactgattgcttgattgatttttctttctcacaaacagctctgtaagctgaatgtcaaaactaaagaaacttgggtttggcaagagcctgattcatacccatcagaacccatctttgtttctcacccagatgccttggaagaagatgatggtaatgaaagcaattgttgtgtctgaatactcttcttactgcagttctgtatgttagttcgttaggaaaggagtaaggttgattattccgtaatactcaaaaacgatccttaatactataaatagagcagtactgaagaattaaaactatttgaaaagaattttcatcttttgatcaggtcttgttgattaccagtagaaaaaaatgtcaaagcaccatttggtgtcacgatggagcatcaatgtctgctctagatgagggagagaaggaagaaaaaatggcaacatgaattccaggtttttgccttccctgacgaagacatatttctaaaaaaatagcaattctaagaagggaagctaagtattatagcagatacaagagaatgagaaggcaggtctgtgaatagttttcatttgttctttcggtaagctagggcttgaaaaaagacccagagccacaccagcaactcagatacagcaactcaaattacaaatcagcagtgttagttaactgcttctcagctgggacagggagatagattacactctatgggattaaaatatggaaaactaagagaaatgagataaagaattgtggagccatttcacactaaatgattttatatatccagtcgaagctgtaaaagatttgttctcattttgttcgaaggaagtcagcttccagatcgatcttagaaaccatacatatgatatatcttactgctttcaaagtcttttaatacacacttttcatgtgatcatcacagtttttacagtatgtacagcaggtgctatatttgtatgttacagataagaacagatccatttattcagtgagtatttaatgagtacctactacgctgtagtcattgtcatagaatattgagatatagcagtgagcaagacagacaagactctcccttcttagagcttacagtgtaggtagggtacataaagagtttaaaagacctctttaggtggtctcatgccaggtggtacaagagtcagaaaaagaagtcaggtcatatggttttctatatttgtcaatgtaatacctcctatattatttcaatgacattcaatctatagcttgggcttttaaaaactcaatattgcctaatttacttctgataaacaggtgtagttctgagtgtggtggtgagcccaggagcaggacaaaagcctgcttatctcctgattctgaatgccaaggacttaagtgaagttgcccgggctgaagtggagattaacatccctgtcacctttcatggactgttcaaaaaatcttgagcatactccagcaagatatgtttttggtagcaaaactgagaaaatcagcttcaggtctgcaatcaaattctgttcaattttagcctgctatatgtcatggttttaacttgcagatgcgcacaattttgcaatgttttacagaaagcactgagttgagcaagcaattcctttatttaaaaaaaaaagtacgtatttagataatcatacttcctctgtgagacaggccataactgaaaaactcttaaatatttagcaatcaaataggaaatgaatgtggacttactaaatggcttttaattcctattataagagcatattttaggtacctatctgctccaattatatttttaacatttaaaaaccaaagtcctctacacttgatttatattatatgtggctttgctgagtcaaggaagtatcatgcaataaggcttaattactaaatgtcaaaccaaactttttctcaaaccagggactatcatctaagattaattacagtaattattttgcgtatacgtaactgctcaaagattatgaatcttatgaatgttaacctttccgtttattacaagcaagtactattatttctgattttataataagaaaatctgtgtttaatcaactgaggcctctcaaccaaataacatctcagagattaagttatatattaaaagcttatgtaacataaaagcaagtacatatagtagtgactatatttaaaaaaacagcataaaatgcttaaaaatgtaatatttactaaaatcagattatgggataatgttgcaggattatactttattgcatcttttttgtttaattgtatttaagcattgtgcaatcacttgggaaaaatattaaattattaacattgaggtattaatacattttaagccttttgtttttaaatttcttttcttccagagattgtttaaaaataaatattgacaaaaataa

SEQ ID NO: 342 - DNA, 1602 bp, Homo sapiens
  source 1..1602: mol_type = other DNA; note = RPE65 CDS (luxturna)
atgtctatccaggttgagcatcctgctggtggttacaagaaactgtttgaaactgtggaggaactgtcctcgccgctcacagctcatgtaacaggcaggatccccctctggctcaccggcagtctccttcgatgtgggccaggactctttgaagttggatctgagccattttaccacctgtttgatgggcaagccctcctgcacaagtttgactttaaagaaggacatgtcacataccacagaaggttcatccgcactgatgcttacgtacgggcaatgactgagaaaaggatcgtcataacagaatttggcacctgtgctttcccagatccctgcaagaatatattttccaggtttttttcttactttcgaggagtagaggttactgacaatgcccttgttaatgtctacccagtgggggaagattactacgcttgcacagagaccaactttattacaaagattaatccagagaccttggagacaattaagcaggttgatctttgcaactatgtctctgtcaatggggccactgctcacccccacattgaaaatgatggaaccgtttacaatattggtaattgctttggaaaaaatttttcaattgcctacaacattgtaaagatcccaccactgcaagcagacaaggaagatccaataagcaagtcagagatcgttgtacaattcccctgcagtgaccgattcaagccatcttacgttcatagttttggtctgactcccaactatatcgtttttgtggagacaccagtcaaaattaacctgttcaagttcctttcttcatggagtctttggggagccaactacatggattgttttgagtccaatgaaaccatgggggtttggcttcatattgctgacaaaaaaaggaaaaagtacctcaataataaatacagaacttctcctttcaacctcttccatcacatcaacacctatgaagacaatgggtttctgattgtggatctctgctgctggaaaggatttgagtttgtttataattacttatatttagccaatttacgtgagaactgggaagaggtgaaaaaaaatgccagaaaggctccccaacctgaagttaggagatatgtacttcctttgaatattgacaaggctgacacaggcaagaatttagtcacgctccccaatacaactgccactgcaattctgtgcagtgacgagactatctggctggagcctgaagttctcttttcagggcctcgtcaagcatttgagtttcctcaaatcaattaccagaagtattgtgggaaaccttacacatatgcgtatggacttggcttgaatcactttgttccagataggctctgtaagctgaatgtcaaaactaaagaaacttgggtttggcaagagcctgattcatacccatcagaacccatctttgtttctcacccagatgccttggaagaagatgatggtgtagttctgagtgtggtggtgagcccaggagcaggacaaaagcctgcttatctcctgattctgaatgccaaggacttaagtgaagttgcccgggctgaagtggagattaacatccctgtcacctttcatggactgttcaaaaaatcttga

SEQ ID NO: 343 - protein, 13 aa, synthetic construct
  source 1..13: note = Pegcetacoplan
ICVWQDWGAHRCT

SEQ ID NO: 344 - RNA, 39 nt, synthetic construct
  source 1..39: mol_type = other RNA; note = Avacincaptad
cgccgcggtctcaggcgctgagtctgagtttacctgcgt

SEQ ID NO: 345 - protein, 214 aa, synthetic construct
  source 1..214: note = Bevacizumab Light Chain
DIQMTQSPSSLSASVGDRVTITCSASQDISNYLNWYQQKPGKAPKVLIYFTSSLHSGVPSRFSGSGSGTDFTLTISSLQPEDFATYYCQQYSTVPWTFGQGTKVEIKRTVAAPSVFIFPPSDEQLKSGTASVVCLLNNFYPREAKVQWKVDNALQSGNSQESVTEQDSKDSTYSLSSTLTLSKADYEKHKVYACEVTHQGLSSPVTKSFNRGEC

SEQ ID NO: 346 - protein, 453 aa, synthetic construct
  source 1..453: note = Bevacizumab Heavy Chain
EVQLVESGGGLVQPGGSLRLSCAASGYTFTNYGMNWVRQAPGKGLEWVGWINTYTGEPTYAADFKRRFTFSLDTSKSTAYLQMNSLRAEDTAVYYCAKYPHYYGSSHWYFDVWGQGTLVTVSSASTKGPSVFPLAPSSKSTSGGTAALGCLVKDYFPEPVTVSWNSGALTSGVHTFPAVLQSSGLYSLSSVVTVPSSSLGTQTYICNVNHKPSNTKVDKKVEPKSCDKTHTCPPCPAPELLGGPSVFLFPPKPKDTLMISRTPEVTCVVVDVSHEDPEVKFNWYVDGVEVHNAKTKPREEQYNSTYRVVSVLTVLHQDWLNGKEYKCKVSNKALPAPIEKTISKAKGQPREPQVYTLPPSREEMTKNQVSLTCLVKGFYPSDIAVEWESNGQPENNYKTTPPVLDSDGSFFLYSKLTVDKSRWQQGNVFSCSVMHEALHNHYTQKSLSLSPGK

SEQ ID NO: 347 - protein, 214 aa, synthetic construct
  source 1..214: note = Ranibizumab light chain
DIQLTQSPSSLSASVGDRVTITCSASQDISNYLNWYQQKPGKAPKVLIYFTSSLHSGVPSRFSGSGSGTDFTLTISSLQPEDFATYYCQQYSTVPWTFGQGTKVEIKRTVAAPSVFIFPPSDEQLKSGTASVVCLLNNFYPREAKVQWKVDNALQSGNSQESVTEQDSKDSTYSLSSTLTLSKADYEKHKVYACEVTHQGLSSPVTKSFNRGEC

SEQ ID NO: 348 - protein, 231 aa, synthetic construct
  source 1..231: note = Ranibizumab heavy chain
EVQLVESGGGLVQPGGSLRLSCAASGYDFTHYGMNWVRQAPGKGLEWVGWINTYTGEPTYAADFKRRFTFSLDTSKSTAYLQMNSLRAEDTAVYYCAKYPYYYGTSHWYFDVWGQGTLVTVSSASTKGPSVFPLAPSSKSTSGGTAALGCLVKDYFPEPVTVSWNSGALTSGVHTFPAVLQSSGLYSLSSVVTVPSSSLGTQTYICNVNHKPSNTKVDKKVEPKSCDKTHL

SEQ ID NO: 349 - protein, 252 aa, synthetic construct
  source 1..252: note = Brolucizumab
MEIVMTQSPSTLSASVGDRVIITCQASEIIHSWLAWYQQKPGKAPKLLIYLASTLASGVPSRFSGSGSGAEFTLTISSLQPDDFATYYCQNVYLASTNGANFGQGTKLTVLGGGGGSGGGGSGGGGSGGGGSEVQLVESGGGLVQPGGSLRLSCTASGFSLTDYYYMTWVRQAPGKGLEWVGFIDPDDDPYYATWAKGRFTISRDNSKNTLYLQMNSLRAEDTAVYYCAGGDHNSGWGLDIWGQGTLVTVSS

SEQ ID NO: 350 - protein, 463 aa, synthetic construct
  source 1..463: note = Faricimab A Chain
QVQLVQSGAEVKKPGASVKVSCKASGYTFTGYYMHWVRQAPGQGLEWMGWINPNSGGTNYAQKFQGRVTMTRDTSISTAYMELSRLRSDDTAVYYCARSPNPYYYDSSGYYYPGAFDIWGQGTMVTVSSASVAAPSVFIFPPSDEQLKSGTASVVCLLNNFYPREAKVQWKVDNALQSGNSQESVTEQDSKDSTYSLSSTLTLSKADYEKHKVYACEVTHQGLSSPVTKSFNRGECDKTHTCPPCPAPEAAGGPSVFLFPPKPKDTLMASRTPEVTCVVVDVSHEDPEVKFNWYVDGVEVHNAKTKPREEQYNSTYRVVSVLTVLAQDWLNGKEYKCKVSNKALGAPIEKTISKAKGQPREPQVCTLPPSRDELTKNQVSLSCAVKGFYPSDIAVEWESNGQPENNYKTTPPVLDSDGSFFLVSKLTVDKSRWQQGNVFSCSVMHEALHNAYTQKSLSLSPGK

SEQ ID NO: 351 - protein, 453 aa, synthetic construct
  source 1..453: note = Faricimab B Chain
EVQLVESGGGLVQPGGSLRLSCAASGYDFTHYGMNWVRQAPGKGLEWVGWINTYTGEPTYAADFKRRFTFSLDTSKSTAYLQMNSLRAEDTAVYYCAKYPYYYGTSHWYFDVWGQGTLVTVSSASTKGPSVFPLAPSSKSTSGGTAALGCLVKDYFPEPVTVSWNSGALTSGVHTFPAVLQSSGLYSLSSVVTVPSSSLGTQTYICNVNHKPSNTKVDKKVEPKSCDKTHTCPPCPAPEAAGGPSVFLFPPKPKDTLMASRTPEVTCVVVDVSHEDPEVKFNWYVDGVEVHNAKTKPREEQYNSTYRVVSVLTVLAQDWLNGKEYKCKVSNKALGAPIEKTISKAKGQPREPQVYTLPPCRDELTKNQVSLWCLVKGFYPSDIAVEWESNGQPENNYKTTPPVLDSDGSFFLYSKLTVDKSRWQQGNVFSCSVMHEALHNAYTQKSLSLSPGK

SEQ ID NO: 352 - protein, 214 aa, synthetic construct; identical to SEQ ID NO: 347
  source 1..214: note = Faricimab C Chain

SEQ ID NO: 353 - protein, 213 aa, synthetic construct
  source 1..213: note = Faricimab D Chain
SYVLTQPPSVSVAPGQTARITCGGNNIGSKSVHWYQQKPGQAPVLVVYDDSDRPSGIPERFSGSNSGNTATLTISRVEAGDEADYYCQVWDSSSDHWVFGGGTKLTVLSSASTKGPSVFPLAPSSKSTSGGTAALGCLVKDYFPEPVTVSWNSGALTSGVHTFPAVLQSSGLYSLSSVVTVPSSSLGTQTYICNVNHKPSNTKVDKKVEPKSC
